(19) United States
(12) Patent Application Publication
(10) Pub. No.: US 2024/0390520 A1
(43) Pub. Date: Nov. 28, 2024

(54) GENE EDITING OF PCSK9 OR ANGPTL3 AND COMPOSITIONS AND METHODS OF USING SAME FOR TREATMENT OF DISEASE

(71) Applicant: Verve Therapeutics, Inc., Boston, MA (US)

(72) Inventors: Andrew M. Bellinger, Wellesley, MA (US); Kallanthottathil G. Rajeev, Wayland, MA (US); Caroline Reiss, Somerville, MA (US); Jamie Denizio, Boston, MA (US); Hariharan Jayaram, Cambridge, MA (US); Sowmya Iyer, Boston, MA (US); Sara Cristina De Almeida Pinto Garcia, Brookline, MA (US); Kui Wang, Boston, MA (US); Alexandra Chadwick, Somerville, MA (US); Christopher Cheng, North Reading, MA (US); Richard Glenn Lee, Carlsbad, CA (US); Ellen Rohde, Ashland, MA (US)

(21) Appl. No.: 18/611,988

(22) Filed: Mar. 21, 2024

Related U.S. Application Data
(63) Continuation of application No. PCT/US2022/044453, filed on Sep. 22, 2022.
(60) Provisional application No. 63/247,236, filed on Sep. 22, 2021.
(60) Provisional application No. 63/255,333, filed on Oct. 13, 2021.
(60) Provisional application No. 63/389,679, filed on Jul. 15, 2022.

(51) Int. Cl. A61K 48/00; A61P 9/10; C12N 9/22; C12N 9/80; C12N 15/11

(52) U.S. Cl. CPC A61K 48/005; A61P 9/10; C12N 9/22; C12N 9/80; C12N 15/111; C12N 2310/20; C12N 2310/321

(57) ABSTRACT

Disclosed herein are novel gene editing systems capable of being delivered to a subject intravenously through a lipid nano particle pharmaceutical formulation and producing durable in vivo editing of a target gene, such as ANGPTL3, with high on-target gene editing efficiency, reduced or low off-target effect, and no germline editing. The gene editing systems comprise a chemically modified guide nucleic acid sequence with a spacer having a specified arrangement of deoxyribonucleotides and ribonucleotides. The novel gene editing systems comprise mRNA that encodes the gene editor proteins, which may include a modified nickase component. Methods of disease treatments using the gene editing systems are also disclosed.

### CROSS REFERENCE TO RELATED APPLICATIONS

[0001] This application is a continuation of International Application No. PCT/US2022/044453, filed Sep. 22, 2022 which claims benefit under 35 U.S.C. § 119 from Provisional Application Ser. No. 63/247,236, filed Sep. 22, 2021; Provisional Application Ser. No. 63/255,333, filed Oct. 13, 2021; and Provisional Application Ser. No. 63/389,679, filed Jul. 15, 2022, the disclosures of which each are incorporated herein by reference in their entirety.

### SEQUENCE LISTING

[0002] The instant application contains a Sequence Listing which has been submitted electronically in XML format and is hereby incorporated by reference by its entirety. Said XML copy, created Aug. 2, 2024, is named 53989-715.301 Replacement_SL_.xml and is 6,731,884 bytes in size.

### SUMMARY OF THE INVENTION

[0003] Described herein is an in vivo hybrid guide gene editing system comprising: (a) a gene editor protein or a component thereof comprising a nucleic acid binding domain, or a nucleic acid encoding the gene editor protein or the component thereof; and (b) a hybrid guide nucleic acid comprising (i) a spacer sequence comprising a deoxyribonucleotide and a ribonucleotide comprising a ribose, wherein a 2′ hydroxyl group of the ribose is covalently linked to a methyl group (2′-OMe), and (ii) a binding scaffold for the gene editor protein or component thereof, wherein (a) and (b) are constituent components of a pharmaceutical composition that comprises a lipid nanoparticle (LNP) containing (a) or (b), wherein the LNP comprises an amino lipid, a phospholipid, a sterol and a PEG lipid. In some embodiments, the spacer sequence corresponds to a protospacer on a target gene, and wherein the target gene is ANGPTL3. In some embodiments, the gene editor protein or the component thereof comprises a deaminase.

[0004] Described herein is an in vivo hybrid guide gene editing system comprising: (a) a gene editor protein or a component thereof comprising a nucleic acid binding domain, or a nucleic acid encoding the gene editor protein or the component thereof; and (b) a hybrid guide nucleic acid comprising (i) a spacer sequence comprising a deoxyribonucleotide and a ribonucleotide, wherein the spacer sequence corresponds to a protospacer on an ANGPTL3 gene, and (ii) a binding scaffold for the gene editor protein or component thereof, wherein (a) and (b) are constituent components of a pharmaceutical composition that comprises a lipid nanoparticle (LNP) containing (a) or (b), wherein the LNP comprises an amino lipid, a phospholipid, a sterol and a PEG lipid. In some embodiments, the gene editor protein or the component thereof comprises a deaminase. In some embodiments, the ribonucleotide comprises a ribose, and wherein the ribose comprises a 2′ hydroxyl group covalently linked to a methyl group (2′-OMe).

[0005] Described herein is an in vivo hybrid guide gene editing system comprising: (a) a gene editor protein or a component thereof comprising a nucleic acid binding domain and a deaminase, or a nucleic acid encoding the gene editor protein or the component thereof; and (b) a hybrid guide nucleic acid comprising (i) a spacer sequence comprising a deoxyribonucleotide and a ribonucleotide, and (ii) a binding scaffold for the gene editor protein or component thereof, wherein (a) and (b) are constituent components of a pharmaceutical composition that comprises a lipid nanoparticle (LNP) containing (a) or (b), wherein the LNP comprises an amino lipid, a phospholipid, a sterol and a PEG lipid. In some embodiments, the spacer sequence corresponds to a protospacer on a target gene, and wherein the target gene is ANGPTL3. In some embodiments, the ribonucleotide comprises a ribose, and wherein the ribose comprises a 2′ hydroxyl group covalently linked to a methyl group (2′-OMe).

[0006] In some embodiments, the spacer sequence comprises an unmodified ribonucleotide. In some embodiments, wherein the nucleic acid encoding the gene editor protein or the component thereof is an mRNA. In some embodiments, the gene editor protein or the component thereof comprises a single fusion protein or two or more proteins. In some embodiments, the spacer sequence comprises a phosphorothioate backbone modification (PS). In some embodiments, the spacer sequence comprises a (2′-OMe)PS(2′-OMe)PS(DNA)PS(DNA)(RNA)(DNA)(DNA)(DNA) motif. In some embodiments, the (2′-OMe)PS(2′-OMe)PS(DNA)PS(DNA)(RNA)(DNA)(DNA)(DNA) motif is located at the 5′ end of the spacer sequence. In some embodiments, the spacer sequence comprises a sequence with at least about 80%, about 90%, about 95%, about 99%, about 99.5%, or about 100% sequence identity or sequence similarity of SEQ ID NO: 30 or 31. In some embodiments, the spacer sequence comprises a (2′-OMe)PS(2′-OMe)PS(DNA)PS(DNA)(RNA)(DNA)(DNA) motif. In some embodiments, the (2′-OMe)PS(2′-OMe)PS(DNA)PS(DNA)(RNA)(DNA)(DNA) motif is located at the 5′ end of the spacer sequence. In some embodiments, the spacer sequence comprises a sequence with at least about 80%, about 90%, about 95%, about 99%, about 99.5%, or about 100% sequence identity or sequence similarity of SEQ ID NO: 28 or 29. In some embodiments, the spacer sequence comprises a (2′-OMe)PS(2′-OMe)PS(DNA)PS(DNA)(DNA)(DNA)(DNA) motif. In some embodiments, the (2′-OMe)PS(2′-OMe)PS(DNA)PS(DNA)(DNA)(DNA)(DNA) motif is located at the 5′ end of the spacer sequence. In some embodiments, the spacer sequence comprises a sequence with at least about 80%, about 90%, about 95%, about 99%, about 99.5%, or about 100% sequence identity or sequence similarity of SEQ ID NO: 5, 11 or 12. In some embodiments, the hybrid guide nucleic acid comprises a sequence with at least about 80%, about 90%, about 95%, about 99%, about 99.5%, or about 100% sequence identity or sequence similarity of a sequence selected from the group consisting of SEQ ID Nos: 110-113. In some embodiments, the hybrid guide nucleic acid comprises a sequence with at least about 80%, about 90%, about 95%, about 96%, about 97%, about 98%, about 99%, about 99.5%, or about 100% sequence identity or sequence similarity of a sequence selected from the group consisting of SEQ ID Nos: 106-109. In some embodiments, the guide nucleic acid comprises a sequence with at least about 80%, about 90%, about 95%, about 96%, about 97%, about 98%, about 99%, about 99.5%, or about 100% sequence identity or sequence similarity of a sequence selected from the group consisting of SEQ ID Nos: 79-82.

[0007] In some embodiments, the nucleic acid binding domain is capable of binding to DNA. In some embodiments, the nucleic acid binding domain is capable of binding to RNA. In some embodiments, the deoxyribonucleotide is located on position 3, 4, 6, 7 or 8 from the 5′ end of the spacer sequence. In some embodiments, the spacer sequence comprises deoxyribonucleotides on positions 3, 4, 6 and 7 from the 5′ end of the spacer sequence. In some embodiments, the spacer sequence comprises deoxyribonucleotides on positions 3 and 4 from the 5′ end of the spacer sequence. In some embodiments, the spacer sequence comprises deoxyribonucleotides on positions 6 and 7 from the 5′ end of the spacer sequence. In some embodiments, the spacer sequence comprises deoxyribonucleotides on positions 3, 4, 6, 7 and 8 from the 5′ end of the spacer sequence. In some embodiments, the spacer sequence comprises one to ten deoxyribonucleotides. In some embodiments, the spacer sequence comprises one to five deoxyribonucleotides. In some embodiments, the DNA binding domain comprises a CRISPR protein or a fragment thereof. In some embodiments, the DNA binding domain comprises a catalytically impaired nuclease. In some embodiments, the DNA binding domain comprises a prime editing protein or a fragment thereof.

[0008] In some embodiments, the gene editor protein or the component thereof affects less than about 10%, about 9%, about 8%, about 7%, about 6%, about 5%, about 4%, about 3%, about 2%, or about 1% editing on all off-target sites as compared to a gene editing system comprising a corresponding gRNA without the deoxyribonucleotide. In some embodiments, the gene editor protein or the component thereof affects over about 50%, about 60%, about 70%, about 80%, about 90%, or about 95% editing on the target gene as compared to a gene editing system comprising a corresponding gRNA without the deoxyribonucleotide. In some embodiments, the gene editor protein or the component thereof affects over about 95%, about 96%, about 97%, about 98%, or about 99% editing on the target gene as compared to a gene editing system comprising a corresponding gRNA without the deoxyribonucleotide. In some embodiments, the gene editor protein or the component thereof affects from about 95% to about 99% editing on the target gene as compared to a gene editing system comprising a corresponding gRNA without the deoxyribonucleotide. In some embodiments, the LNP comprises a N-acetylgalactosamine (GalNAc) lipid receptor targeting conjugate. In some embodiments, the target gene is expressed in liver, or cells or tissues of liver origin. In some embodiments, the target gene is expressed in a non-liver organ or cells or tissues of non-liver origin.

[0009] Described herein is a method for treating or preventing an atherosclerotic cardiovascular disease in a subject in need thereof, the method comprising administering to the subject a therapeutically effective amount of the in vivo hybrid guide gene editing system described herein. In some embodiments, the subject is a primate. In some embodiments, the primate is human.

[0010] Described herein is a gene editing system comprising: (a) a gene editor protein or a component thereof comprising a nucleic acid binding domain, or a nucleic acid encoding the gene editor protein or the component thereof; and (b) a hybrid guide nucleic acid comprising a spacer sequence, wherein the spacer sequence comprises a deoxyribonucleotide and a ribonucleotide comprising a ribose, and wherein a 2′ hydroxyl group of the ribose is covalently linked to a methyl group (2′-OMe).

[0011] Described herein is a gene editing system comprising: (a) a gene editor protein or a component thereof comprising a nucleic acid binding domain, or a nucleic acid encoding the gene editor protein or the component thereof; and (b) a hybrid guide nucleic acid comprising a spacer sequence, wherein the spacer sequence comprises a deoxyribonucleotide and a ribonucleotide, and wherein the spacer sequence corresponds to a protospacer on an ANGPTL3 gene.

[0012] Described herein is a gene editing system comprising: (a) a gene editor protein or a component thereof comprising a nucleic acid binding domain and a deaminase, or a nucleic acid encoding the gene editor protein or the component thereof, and (b) a hybrid guide nucleic acid comprising a spacer sequence, wherein the spacer sequence comprises a deoxyribonucleotide and a ribonucleotide.

[0013] Described herein is a hybrid guide nucleic acid for a gene editing system, wherein the hybrid guide comprises (i) a spacer sequence comprising a deoxyribonucleotide and a ribonucleotide comprising a ribose, wherein a 2′ hydroxyl group of the ribose is covalently linked to a methyl group (2′-OMe), and (ii) a binding scaffold. In some embodiments, the spacer sequence comprises a (2′-OMe)PS(2′-OMe)PS(DNA)PS(DNA)(RNA)(DNA)(DNA)(DNA) motif. In some embodiments, the (2′-OMe)PS(2′-OMe)PS(DNA)PS(DNA)(RNA)(DNA)(DNA)(DNA) motif is located at the 5′ end of the spacer sequence. In some embodiments, the spacer sequence comprises a sequence with at least about 80%, about 90%, about 95%, about 99%, about 99.5%, or about 100% sequence identity or sequence similarity of SEQ ID NO: 30 or 31. In some embodiments, the spacer sequence comprises a (2′-OMe)PS(2′-OMe)PS(DNA)PS(DNA)(RNA)(DNA)(DNA) motif. In some embodiments, the (2′-OMe)PS(2′-OMe)PS(DNA)PS(DNA)(RNA)(DNA)(DNA) motif is located at the 5′ end of the spacer sequence. In some embodiments, the spacer sequence comprises a sequence with at least about 80%, about 90%, about 95%, about 99%, about 99.5%, or about 100% sequence identity or sequence similarity of SEQ ID NO: 28 or 29. In some embodiments, the spacer sequence comprises a (2′-OMe)PS(2′-OMe)PS(DNA)PS(DNA)(DNA)(DNA)(DNA) motif. In some embodiments, the (2′-OMe)PS(2′-OMe)PS(DNA)PS(DNA)(DNA)(DNA)(DNA) motif is located at the 5′ end of the spacer sequence. In some embodiments, the spacer sequence comprises a sequence with at least about 80%, about 90%, about 95%, about 99%, about 99.5%, or about 100% sequence identity or sequence similarity of SEQ ID NO: 5, 11 or 12. In some embodiments, the hybrid guide nucleic acid comprises a sequence with at least about 80%, about 90%, about 95%, about 99%, about 99.5%, or about 100% sequence identity or sequence similarity of a sequence selected from the group consisting of SEQ ID Nos: 110-113. In some embodiments, the hybrid guide nucleic acid comprises a sequence with at least about 80%, about 90%, about 95%, about 96%, about 97%, about 98%, about 99%, about 99.5%, or about 100% sequence identity or sequence similarity of a sequence selected from the group consisting of SEQ ID Nos: 106-109. In some embodiments, the guide nucleic acid comprises a sequence with at least about 80%, about 90%, about 95%, about 96%, about 97%, about 98%, about 99%, about 99.5%, or about 100% sequence identity or sequence similarity of a sequence selected from the group consisting of SEQ ID Nos: 79-82.

[0014] Described herein is a composition comprising a Cas9 nickase, wherein the Cas9 nickase comprises a mutation, and wherein the mutation is selected from the group consisting of: N692A, M694A, Q695A, H698A, K810A, K855A, K848A, K1003A, R1060A as compared to a Cas9 nickase of SEQ ID NO: 695 In some embodiments, the Cas9 nickase comprises a sequence with at least 90% identity to SEQ ID NO: 695. In some embodiments, the Cas9 nickase comprises a sequence with at least 95% identity to SEQ ID NO: 695. In some embodiments, the Cas9 nickase comprises a sequence with at least 98% identity to SEQ ID NO: 695. In some embodiments, the Cas9 nickase comprises a sequence with at least 99% identity to SEQ ID NO: 695. In some embodiments, the Cas9 nickase comprises a sequence with at least 99.5% identity to SEQ ID NO: 695. In some embodiments, the mutation comprises N692A, M694A, Q695A and H698A as compared to the Cas9 nickase of SEQ ID NO: 695. In some embodiments, the mutation comprises K855A as compared to the Cas9 nickase of SEQ ID NO: 695. In some embodiments, the mutation comprises K848A, K1003A and R1060A as compared to the Cas9 nickase of SEQ ID NO: 695. In some embodiments, the mutation comprises K810A, K1003A, R1060A as compared to the Cas9 nickase of SEQ ID NO: 695.

[0015] Described herein is a composition comprising a nucleic acid encoding a Cas9 nickase, wherein the nucleic acid encoding the Cas9 nickase comprises a mutation, and wherein the mutation is selected from the group consisting of: AAC at codon 692 is mutated to GCC, AUG at codon 694 is mutated to GCC, CAG at codon 695 is mutated to GCC, CAC at codon 698 is mutated to GCC, AAG at codon 855 is mutated to GCC, AAG at codon 810 is mutated to GCC, AAG at codon 848 is mutated to GCC, AAG at codon 1003 is mutated to GCC, and CGG at codon 1060 is mutated to GCC as compared to a nucleic acid of SEQ ID NO: 694. In some embodiments, the nucleic acid encoding the Cas9 nickase comprises a sequence with at least 90% identity to SEQ ID NO: 694. In some embodiments, the nucleic acid encoding the Cas9 nickase comprises a sequence with at least 95% identity to SEQ ID NO: 694. In some embodiments, the nucleic acid encoding the Cas9 nickase comprises a sequence with at least 98% identity to SEQ ID NO: 694. In some embodiments, the nucleic acid encoding the Cas9 nickase comprises a sequence with at least 99% identity to SEQ ID NO: 694. In some embodiments, the nucleic acid encoding the Cas9 nickase comprises a sequence with at least 99.5% identity to SEQ ID NO: 694. In some embodiments, the mutation comprises AAC at codon 692 is mutated to GCC, AUG at codon 694 is mutated to GCC, CAG at codon 695 is mutated to GCC and CAC at codon 698 is mutated to GCC as compared to the nucleic acid SEQ ID NO: 694. In some embodiments, the mutation comprises AAG at codon 855 is mutated to GCC as compared to the nucleic acid SEQ ID NO: 694. In some embodiments, the mutation comprises AAG at codon 878 is mutated to GCC, AAG at codon 1003 is mutated to GCC, and CGG at codon 1060 is mutated to GCC as compared to the nucleic acid SEQ ID NO: 694. In some embodiments, the mutation comprises AAG at codon 810 is mutated to GCC, AAG at codon 1003 is mutated to GCC, and CGG at codon 1060 is mutated to GCC as compared to the nucleic acid SEQ ID NO: 694.

[0016] Described herein is a gene editing system comprising: (a) a Cas9 nickase, and (b) a guide RNA comprising a spacer corresponding to protospacer sequence on a target gene and a binding scaffold for the Cas9 nickase, wherein the Cas9 nickase comprises a mutation, wherein the mutation is selected from the group consisting of: N692A, M694A, Q695A, H698A, K810A, K855A, K848A, K1003A, R1060A as compared to a Cas9 nickase of SEQ ID NO: 695. In some embodiments, the gene editing system comprises a deaminase. In some embodiments, the gene editing system comprises a polymerase. In some embodiments, the polymerase is a reverse transcriptase. In some embodiments, the target gene is PCSK9. In some embodiments, the target gene is ANGPTL3. In some embodiments, the Cas9 nickase comprises a sequence with at least 90% identity to SEQ ID NO: 695. In some embodiments, the Cas9 nickase comprises a sequence with at least 95% identity to SEQ ID NO: 695. In some embodiments, the Cas9 nickase comprises a sequence with at least 98% identity to SEQ ID NO: 695. In some embodiments, the Cas9 nickase comprises a sequence with at least 99% identity to SEQ ID NO: 695. In some embodiments, the Cas9 nickase comprises a sequence with at least 99.5% identity to SEQ ID NO: 695. In some embodiments, the mutation comprises N692A, M694A, Q695A and H698A as compared to the Cas9 nickase of SEQ ID NO: 695. In some embodiments, the mutation comprises K855A as compared to the Cas9 nickase of SEQ ID NO: 695. In some embodiments, the mutation comprises K848A, K1003A and R1060A as compared to the Cas9 nickase of SEQ ID NO: 695. In some embodiments, the mutation comprises K810A, K1003A, R1060A as compared to the Cas9 nickase of SEQ ID NO: 695.

[0017] Described herein is a gene editing system comprising: (a) a nucleic acid encoding a Cas9 nickase, and (b) a guide RNA comprising a spacer corresponding to protospacer sequence on a target gene and a binding scaffold for the Cas9 nickase, wherein the nucleic acid encoding the Cas9 nickase comprises a mutation, wherein the mutation is selected from the group consisting of: AAC at codon 692 is mutated to GCC, AUG at codon 694 is mutated to GCC, CAG at codon 695 is mutated to GCC, CAC at codon 698 is mutated to GCC, AAG at codon 855 is mutated to GCC, AAG at codon 810 is mutated to GCC, AAG at codon 848 is mutated to GCC, AAG at codon 1003 is mutated to GCC, and CGG at codon 1060 is mutated to GCC as compared to a nucleic acid of SEQ ID NO: 694. In some embodiments, the gene editing system comprises a nucleic acid encoding a deaminase. In some embodiments, the gene editing system comprises a nucleic acid encoding a polymerase. In some embodiments, the polymerase is a reverse transcriptase. In some embodiments, the target gene is PCSK9. In some embodiments, the target gene is ANGPTL3. In some embodiments, the nucleic acid encoding the Cas9 nickase comprises a sequence with at least 90% identity to SEQ ID NO: 694. In some embodiments, the nucleic acid encoding the Cas9 nickase comprises a sequence with at least 95% identity to SEQ ID NO: 694. In some embodiments, the nucleic acid encoding the Cas9 nickase comprises a sequence with at least 98% identity to SEQ ID NO: 694. In some embodiments, the nucleic acid encoding the Cas9 nickase comprises a sequence with at least 99% identity to SEQ ID NO: 694. In some embodiments, the nucleic acid encoding the Cas9 nickase comprises a sequence with at least 99.5% identity to SEQ ID NO: 694. In some embodiments, the mutation comprises AAC at codon 692 is mutated to GCC, AUG at codon 694 is mutated to GCC, CAG at codon 695 is mutated to GCC and CAC at codon 698 is mutated to GCC as compared to the nucleic acid SEQ ID NO: 694. In some embodiments, the mutation comprises AAG at codon 855 is mutated to GCC as compared to the nucleic acid SEQ ID NO: 694. In some embodiments, the mutation comprises AAG at codon 878 is mutated to GCC, AAG at codon 1003 is mutated to GCC, and CGG at codon 1060 is mutated to GCC as compared to the nucleic acid SEQ ID NO: 694. In some embodiments, the mutation comprises AAG at codon 810 is mutated to GCC, AAG at codon 1003 is mutated to GCC, and CGG at codon 1060 is mutated to GCC as compared to the nucleic acid SEQ ID NO: 694.

[0018] Described herein is a nucleic acid comprises a sequence selected from the group consisting of SEQ ID NOs: 723, 725, 727 and 729.

[0019] Described herein is a base editor protein, wherein the base editor protein comprises a sequence selected from the group consisting of SEQ ID NOs: 724, 726, 728, and 730.

[0020] Described herein is a pharmaceutical composition for a human subject comprising: (a) a mRNA encoding a base editor protein, wherein the base editor protein comprises a nucleic acid binding domain, (b) a guide RNA that serves to guide the nucleic acid binding domain to a protospacer sequence on a target gene, and (c) a LNP comprising an amino lipid, a PEG lipid, a phospholipid and a sterol, wherein a total amount of the guide RNA and the mRNA is about 0.01 mg/kg to about 3 mg/kg. In some embodiments, the total amount of the guide RNA and the mRNA is about 0.1 mg/kg to about 3 mg/kg. In some embodiments, the total amount of the guide RNA and the mRNA is about 0.01 mg/kg to about 2 mg/kg. In some embodiments, the total amount of the guide RNA and the mRNA is about 0.1 mg/kg to about 2 mg/kg. In some embodiments, the total amount of the guide RNA and the mRNA is about 0.01 mg/kg to about 1.5 mg/kg. In some embodiments, the total amount of the guide RNA and the mRNA is about 0.1 mg/kg to about 1.5 mg/kg. In some embodiments, the total amount of the guide RNA and the mRNA is about 0.01 mg/kg to about 1.25 mg/kg. In some embodiments, the total amount of the guide RNA and the mRNA is about 0.1 mg/kg to about 1.25 mg/kg. In some embodiments, the total amount of the guide RNA and the mRNA is about 0.01 mg/kg to about 1 mg/kg. In some embodiments, the total amount of the guide RNA and the mRNA is about 0.1 mg/kg to about 1 mg/kg. In some embodiments, the total amount of the guide RNA and the mRNA is about 0.1 mg/kg. In some embodiments, the total amount of the guide RNA and the mRNA is about 0.2 mg/kg. In some embodiments, the total amount of the guide RNA and the mRNA is about 0.3 mg/kg. In some embodiments, the total amount of the guide RNA and the mRNA is about 0.4 mg/kg. In some embodiments, the total amount of the guide RNA and the mRNA is about 0.5 mg/kg. In some embodiments, the total amount of the guide RNA and the mRNA is about 0.6 mg/kg. In some embodiments, the total amount of the guide RNA and the mRNA is about 0.7 mg/kg. In some embodiments, the total amount of the guide RNA and the mRNA is about 0.8 mg/kg. In some embodiments, the total amount of the guide RNA and the mRNA is about 0.9 mg/kg. In some embodiments, the total amount of the guide RNA and the mRNA is about 1 mg/kg. In some embodiments, the total amount of the guide RNA and the mRNA is about 1 mg/kg to about 3 mg/kg. In some embodiments, the total amount of the guide RNA and the mRNA is about 1.1 mg/kg to about 3 mg/kg. In some embodiments, the total amount of the guide RNA and the mRNA is about 1.2 mg/kg to about 3 mg/kg. In some embodiments, the total amount of the guide RNA and the mRNA is about 1.3 mg/kg to about 3 mg/kg. In some embodiments, the total amount of the guide RNA and the mRNA is about 1.4 mg/kg to about 3 mg/kg. In some embodiments, the total amount of the guide RNA and the mRNA is about 1.5 mg/kg to about 3 mg/kg. In some embodiments, the total amount of the guide RNA and the mRNA is about 1.6 mg/kg to about 3 mg/kg. In some embodiments, the total amount of the guide RNA and the mRNA is about 1.7 mg/kg to about 3 mg/kg. In some embodiments, the total amount of the guide RNA and the mRNA is about 1.8 mg/kg to about 3 mg/kg. In some embodiments, the total amount of the guide RNA and the mRNA is about 1.9 mg/kg to about 3 mg/kg.

[0021] Described herein is a pharmaceutical composition for a human subject comprising: (a) a mRNA encoding a base editor protein, wherein the base editor protein comprises a nucleic acid binding domain, (b) a guide RNA that serves to guide the nucleic acid binding domain to a protospacer sequence on a target gene, and (b) a LNP comprising an amino lipid, a PEG lipid, a phospholipid and a sterol, wherein administration of the gene editing system results in a plasma Cmax of the mRNA in the human subject to be about 0.05 μg/mL to about 5 μg/mL. In some embodiments, the plasma Cmax of the mRNA in the human subject is about 0.1 μg/mL to about 5 μg/mL. In some embodiments, the plasma Cmax of the mRNA in the human subject is about 0.2 μg/mL to about 5 μg/mL. In some embodiments, the plasma Cmax of the mRNA in the human subject is about 0.5 μg/mL to about 5 μg/mL. In some embodiments, the plasma Cmax of the mRNA in the human subject is about 1 μg/mL to about 5 μg/mL. In some embodiments, the plasma Cmax of the mRNA in the human subject is about 2 μg/mL to about 5 μg/mL. In some embodiments, the plasma Cmax of the mRNA in the human subject is about 3 μg/mL to about 5 μg/mL. In some embodiments, the plasma Cmax of the mRNA in the human subject is about 4 μg/mL to about 5 μg/mL.

[0022] Described herein is a pharmaceutical composition for a human subject comprising: (a) a mRNA encoding a base editor protein, wherein the base editor protein comprises a nucleic acid binding domain, (b) a guide RNA that serves to guide the nucleic acid binding domain to a protospacer sequence on a target gene, and (c) a LNP comprising an amino lipid, a PEG lipid, a phospholipid and a sterol, wherein administration of the gene editing system results in an AUC of the mRNA in the human subject to be about 1 μg×h/mL to about 100 μg×h/mL. In some embodiments, the AUC of the mRNA in the human subject is about 1 μg×h/mL to about 50 μg×h/mL. In some embodiments, the AUC of the mRNA in the human subject is about 1 μg×h/mL to about 20 μg×h/mL. In some embodiments, the AUC of the mRNA in the human subject is about 1 μg×h/mL to about 10 μg×h/mL. In some embodiments, the AUC of the mRNA in the human subject is about 10 μg×h/mL to about 100 μg×h/mL. In some embodiments, the AUC of the mRNA in the human subject is about 10 μg×h/mL to about 50 μg×h/mL. In some embodiments, the AUC of the mRNA in the human subject is about 10 μg×h/mL to about 20 μg×h/mL. In some embodiments, the AUC of the mRNA in the human subject is about 20 μg×h/mL to about 100 μg×h/mL. In some embodiments, the AUC of the mRNA in the human subject is about 20 μg×h/mL to about 50 μg×h/mL. In some embodiments, the AUC of the mRNA in the human subject is about 20 μg×h/mL to about 30 μg×h/mL. In some embodiments, the AUC of the mRNA in the human subject is about 30 μg×h/mL to about 100 μg×h/mL. In some embodiments, the AUC of the mRNA in the human subject is about 30 μg×h/mL to about 50 μg×h/mL. In some embodiments, the AUC of the mRNA in the human subject is about 50 μg×h/mL to about 100 μg×h/mL.

[0023] Described herein is a pharmaceutical composition for a human subject comprising: (a) a mRNA encoding a base editor protein, wherein the base editor protein comprises a nucleic acid binding domain, (b) a guide RNA that serves to guide the nucleic acid binding domain to a protospacer sequence on a target gene, and (c) a LNP comprising an amino lipid, a PEG lipid, a phospholipid and a sterol, wherein administration of the gene editing system results in a plasma Cmax of the amino lipid in the human subject to be about 1 μg/mL to about 100 μg/mL. In some embodiments, the plasma Cmax of the amino lipid in the human subject is about 1 μg/mL to about 50 μg/mL. In some embodiments, the plasma Cmax of the amino lipid in the human subject is about 1 μg/mL to about 30 μg/mL. In some embodiments, the plasma Cmax of the amino lipid in the human subject is about 1 μg/mL to about 20 μg/mL. In some embodiments, the plasma Cmax of the amino lipid in the human subject is about 1 μg/mL to about 10 μg/mL. In some embodiments, the plasma Cmax of the amino lipid in the human subject is about 10 μg/mL to about 100 μg/mL. In some embodiments, the plasma Cmax of the amino lipid in the human subject is about 10 μg/mL to about 50 μg/mL. In some embodiments, the plasma Cmax of the amino lipid in the human subject is about 10 μg/mL to about 30 μg/mL. In some embodiments, the plasma Cmax of the amino lipid in the human subject is about 20 μg/mL to about 100 μg/mL. In some embodiments, the plasma Cmax of the amino lipid in the human subject is about 20 μg/mL to about 50 μg/mL. In some embodiments, the plasma Cmax of the amino lipid in the human subject is about 50 μg/mL to about 100 μg/mL.

[0024] Described herein is a pharmaceutical composition for a human subject comprising: (a) a mRNA encoding a base editor protein, wherein the base editor protein comprises a nucleic acid binding domain, (b) a guide RNA that serves to guide the nucleic acid binding domain to a protospacer sequence on a target gene, and (c) a LNP comprising an amino lipid, a PEG lipid, a phospholipid and a sterol, wherein administration of the gene editing system results in an AUC of the amino lipid in the human subject to be about 100 μg×h/mL to about 10000 μg×h/mL. In some embodiments, the AUC of the amino lipid in the human subject is about 100 μg×h/mL to about 5000 μg×h/mL. In some embodiments, the AUC of the amino lipid in the human subject is about 100 μg×h/mL to about 2000 μg×h/mL. In some embodiments, the AUC of the amino lipid in the human subject is about 100 μg×h/mL to about 1000 μg×h/mL. In some embodiments, the AUC of the amino lipid in the human subject is about 100 μg×h/mL to about 500 μg×h/mL. In some embodiments, the AUC of the amino lipid in the human subject is about 500 μg×h/mL to about 10000 μg×h/mL. In some embodiments, the AUC of the amino lipid in the human subject is about 500 μg×h/mL to about 5000 μg×h/mL. In some embodiments, the AUC of the amino lipid in the human subject is about 500 μg×h/mL to about 2000 μg×h/mL. In some embodiments, the AUC of the amino lipid in the human subject is about 500 μg×h/mL to about 1000 μg×h/mL. In some embodiments, the AUC of the amino lipid in the human subject is about 1000 μg×h/mL to about 10000 μg×h/mL. In some embodiments, the AUC of the amino lipid in the human subject is about 1000 μg×h/mL to about 5000 μg×h/mL. In some embodiments, the AUC of the amino lipid in the human subject is about 5000 μg×h/mL to about 10000 μg×h/mL.

[0025] Described herein is a pharmaceutical composition for a human subject comprising: (a) a mRNA encoding a base editor protein, wherein the base editor protein comprises a nucleic acid binding domain, (b) a guide RNA that serves to guide the nucleic acid binding domain to a protospacer sequence on a target gene, and (c) a LNP comprising an amino lipid, a PEG lipid, a phospholipid and a sterol, wherein administration of the gene editing system results in a plasma Cmax of the PEG lipid in the human subject to be about 0.1 μg/mL to about 50 μg/mL. In some embodiments, the plasma Cmax of the PEG lipid in the human subject is about 0.1 μg/mL to about 25 μg/mL. In some embodiments, the plasma Cmax of the PEG lipid in the human subject is about 0.1 μg/mL to about 10 μg/mL. In some embodiments, the plasma Cmax of the PEG lipid in the human subject is about 0.1 μg/mL to about 5 μg/mL. In some embodiments, the plasma Cmax of the PEG lipid in the human subject is about 0.1 μg/mL to about 1 μg/mL. In some embodiments, the plasma Cmax of the PEG lipid in the human subject is about 1 μg/mL to about 50 μg/mL. In some embodiments, the plasma Cmax of the PEG lipid in the human subject is about 1 μg/mL to about 25 μg/mL. In some embodiments, the plasma Cmax of the PEG lipid in the human subject is about 1 μg/mL to about 10 μg/mL. In some embodiments, the plasma Cmax of the PEG lipid in the human subject is about 10 μg/mL to about 50 μg/mL. In some embodiments, the plasma Cmax of the PEG lipid in the human subject is about 10 μg/mL to about 25 μg/mL. In some embodiments, the plasma Cmax of the PEG lipid in the human subject is about 25 μg/mL to about 50 μg/mL.

[0026] Described herein is a pharmaceutical composition for a human subject comprising: (a) a mRNA encoding a base editor protein, wherein the base editor protein comprises a nucleic acid binding domain, (b) a guide RNA that serves to guide the nucleic acid binding domain to a protospacer sequence on a target gene, and (c) a LNP comprising an amino lipid, a PEG lipid, a phospholipid and a sterol, wherein administration of the gene editing system results in an AUC of the PEG lipid in the human subject to be about 10 μg×h/mL to about 5000 μg×h/mL. In some embodiments, the AUC of the PEG lipid in the human subject is about 10 μg×h/mL to about 2000 μg×h/mL. In some embodiments, the AUC of the PEG lipid in the human subject is about 10 μg×h/mL to about 1000 μg×h/mL. In some embodiments, the AUC of the PEG lipid in the human subject is about 10 μg×h/mL to about 500 μg×h/mL. In some embodiments, the AUC of the PEG lipid in the human subject is about 10 μg×h/mL to about 100 μg×h/mL. In some embodiments, the AUC of the PEG lipid in the human subject is about 100 μg×h/mL to about 5000 μg×h/mL. In some embodiments, the AUC of the PEG lipid in the human subject is about 100 μg×h/mL to about 2000 μg×h/mL. In some embodiments, the AUC of the PEG lipid in the human subject is about 100 μg×h/mL to about 1000 μg×h/mL. In some embodiments, the AUC of the PEG lipid in the human subject is about 100 μg×h/mL to about 500 μg×h/mL. In some embodiments, the AUC of the PEG lipid in the human subject is about 500 μg×h/mL to about 5000 μg×h/mL. In some embodiments, the AUC of the PEG lipid in the human subject is about 500 μg×h/mL to about 2000 μg×h/mL. In some embodiments, the AUC of the PEG lipid in the human subject is about 500 μg×h/mL to about 1000 μg×h/mL. In some embodiments, the AUC of the PEG lipid in the human subject is about 1000 μg×h/mL to about 5000 μg×h/mL. In some embodiments, the AUC of the PEG lipid in the human subject is about 1000 μg×h/mL to about 2000 μg×h/mL. In some embodiments, the AUC of the PEG lipid in the human subject is about 2000 μg×h/mL to about 5000 μg×h/mL.

[0027] In some embodiments, the phospholipid is distearoylphosphatidylcholine (DSPC). In some embodiments, the sterol is cholesterol. In some embodiments, the LNP comprises a N-acetylgalactosamine (GalNAc) lipid receptor targeting conjugate.

[0028] Described herein is a method for treating or preventing an atherosclerotic cardiovascular disease in a human subject in need thereof, the method comprising administering to the subject a therapeutically effective amount of pharmaceutical composition of any one of claims 116-219.

### INCORPORATION BY REFERENCE

[0029] All publications, patents, and patent applications mentioned in this specification are herein incorporated by reference in their entireties to the same extent as if each individual publication, patent, or patent application was specifically and individually indicated to be incorporated by reference.

### BRIEF DESCRIPTION OF THE DRAWINGS

[0030] Novel features of the invention are set forth with particularity in the appended claims. A better understanding of the features and advantages of the present invention will be obtained by reference to the following detailed description that sets forth illustrative embodiments, in which the principles of the invention are utilized, and the accompanying drawings of which:

[0031] FIG. 1 presents data from an in vitro potency study illustrating the percent editing of PCSK9 gene in primary human hepatocytes (PHH) as comparted to primary non-human primate hepatocytes (e.g., primary cyno hepatocytes (PCH)) using an LNP PCSK9 base editor formulation comprising a payload of mRNA MA004 and guide RNA GA346 at 1:1 mRNA:gRNA weight ratio and titrated at different concentrations against multiple lots of PHH and PCH cells. As illustrated in FIG. 1, the administered PCSK9 base editor formulation appears more potent in human than non-human primate hepatocytes.

[0032] FIG. 2 illustrates a study protocol using LNP PCSK9 base editor formulation comprising a payload of mRNA MA004 and guide RNA GA346 at 1:1 mRNA:gRNA weight ratio involving a first group of 4 NHPs intravenously infused with a single dose of 0.75 mg/kg, a second group of 22 NHPs intravenously infused with a single dose of 1.5 mg/kg, and third group (“vehicle control”) of 10 NHPs intravenously infused with a single dose of the same LNP delivery vehicle without the gRNA and mRNA drug substance payload. The dose is measured by the total weight of mRNA and gRNA over the weight of the subject.

[0033] FIGS. 3-7 is data obtained from the study described in FIG. 2 setting forth PCSK9 editing percent change from baseline through liver biopsy assessing whole liver DNA editing at day 15 post infusion and PCSK9 protein reduction at day 14 post infusion (FIG. 3), PCSK9 protein reduction over an extended period of time post infusion (FIG. 4), LDL-C reduction over an extended period of time post infusion (FIG. 5), ALT enzyme levels over an extended period of time post infusion (FIG. 6), and fasting glucose levels over an extended time period post infusion (FIG. 7).

[0034] FIGS. 8-10 illustrate a mouse study protocol (FIG. 8) and data generated from the study supporting the durability of liver editing using the PCSK9 base editor LNP formulations described herein in regenerated PCSK9 edited liver cells post intravenous infusion (FIGS. 9-10). Each dot in the graphs depicted in FIGS. 8-9 represents a mouse.

[0035] FIG. 11 illustrates data from an NHP study that shows no evidence of editing in sperm from sexually mature male NHPs post intravenous infusion of PCSK9 base editor LNP formulation described herein.

[0036] FIGS. 12-15 is a study protocol and data generated therefrom assessing potential off-target candidate sites of PCSK9 base editor formulations described herein. FIG. 12 is a schematic illustrating the experimental methods used for evaluating the presence of actual off-target editing by the PCSK9 base editor formulations described herein. FIG. 13 illustrates the high sensitivity of the validation assay employed. FIGS. 14-15 are jitter plots generated from the off-target protocol and the validation assay employed showing that there is no detectable off target editing in primary human liver and spleen cells among the top 244 off target candidate sites identified.

[0037] FIG. 16 illustrates data from a bio-distribution study of NHPs intravenously dosed with single 1 mg/kg LNP constituted with an ABE mRNA MA004 and guide RNA GA346. The NHPs were sacrificed on day 15 post infusion and tissue samples taken and analyzed for adenine editing of the PCSK9 gene. PCSK9 editing was observed to be predominately distributed to the liver.

[0038] FIG. 17 illustrates the potency of disclosed gRNA variants directed to ANGPTL3 and their on-target editing percentage of ANGPTL3 at position 6 in human primary hepatocytes. It should be understood that the “position 6,” as used in the data referencing position 6, refers to the 6th position counting from the 5′ end of the protospacer sequence (i.e., the opposite end from the PAM). The gRNA variants were transfected into human primary hepatocyte cells together with ABE mRNA MA004 at the concentrations noted therein in a manner described herein.

[0039] FIG. 18 illustrates the potency truncated guide RNA GA441 (n-1: GA475, n-2: GA576, n-3: GA477) and their on-target editing percentage of ANGPTL3 at the desired editing position in Human primary hepatocytes combined with the observed corresponding reduction of potential off-target editing at selected off-target candidate sites (OT #1, OT #2, OT #3, OT #4). The gRNA truncated variants were transfected into human primary hepatocyte cells together with mRNA MA004 in a manner described herein and illustrate how such truncated variants of gRNA GA441 impact potential off-target sites more than on-target editing.

[0040] FIG. 19 shows exemplary modified ABE variants transfected with gRNA GA441 and their on-target editing percentage of ANGPTL3 at position 6 in primary human hepatocytes (PHH) transfected with gRNA GA441 together with the identified ABE variant at the noted concentrations in a manner described herein. Each sample was normalized to the respective MA004 ABE mRNA sample per concentration. Each set of columns in the illustrated graph correspond to MA004, MA040, MA041, MA045, MA064, MA065, MA066, and MA067, in order, as read from left to right as further represented by the hash marks in the legend.

[0041] FIGS. 20A-20E show data generated using various ANGPTL3 gRNAs and ABE mRNAs mRNA MA004 and variants thereof. MA040, MA041 and MA045 to illustrate the relative potency of each combination of gRNA and mRNA vis-à-vis on-target editing of ANGPTL3 in human primary hepatocytes transfected at the noted concentrations. FIG. 20A, FIG. 20B, and FIG. 20C are results from experiment 1 using MA004 encoding ABE8.8, MA040 encoding ABE8.8 D1135E, and MA041 encoding ABE8.8 R691A/D1135E, respectively, with ANGPTL3 targeted gRNA GA441, GA442, GA472, GA473, GA474, GA475, GA476 and GA477 as specified in the gRNA legend and illustrated in the graphs in order from left to right. FIG. 20D and FIG. 20E are results from experiment 2 using MA004 encoding ABE8.8, and MA045 encoding ABE8.8 R691A, respectively.

[0042] FIG. 21 is a comparative graph illustrating the percent on target editing of PCSK9 of human primary hepatocytes transfected with the referenced gRNA variants and ABE mRNA MA004 at the noted 4 concentrations. The graph illustrates the relative potency between different gRNAs in human primary hepatocytes. From left to right of the graph, the gRNA variants in the 4 concentrations are GA346, GA376, GA377, GA380, GA381, GA382, GA383, GA384, GA385, GA386, GA387, GA388, GA389, and GA391 respectively.

[0043] FIG. 22 is a comparative graph illustrating the percent on target editing of PCSK9 of cyno primary hepatocytes transfected with the referenced gRNA variants and ABE mRNA MA004 at the noted 4 concentrations. The graph illustrates the relative potency in primary hepatocytes between spacer and tracr chemistries variants of gRNA GA346 embodied in the referenced gRNA variants. From left to right of the graph, the gRNA variants in the 4 concentrations are GA346, GA376, GA377, GA380, GA381, GA382, GA383, GA384, GA385, GA386, GA387, GA388, GA389, and GA391 respectively.

[0044] FIG. 23 is a comparative graph illustrating the percent on-target editing of PCSK9 of primary hepatocyte transfected with ABE mRNA M004 in combination with gRNAs GA376, GA377, GA380-GA389, GA391 and GA066 (from left to right) between guide concentration of 312.5 ng/TA/mL to 2500 ng/TA/mL. Four different lots of GA066 were used in this study. GA376, GA377, GA380, GA383, GA385 and GA386 showed comparable dose response to GA066. The graph illustrates the relative potency between the gRNAs in human primary hepatocytes.

[0045] FIG. 24 is a table illustrating predicted exposures for LNP constituted with an ABE mRNA MA004 and guide RNA GA346 in Humans. Pharmacokinetic (“PK”) modeling using the NHP data disclosed herein was used to predict exposure correlations in human subjects and potential safety margin. Abbreviations: AUC=area under the plasma concentration-time curve; plasma Cₘₐₓ=plasma maximal concentration; NHP=non-human primate. The modeling employed the following assumption:
[0046] (a) A graded infusion: the first 15 minutes the infusion rate (in terms of volume) is 1 mL/min; for the remaining infusion duration, the infusion rate is 3 mL/min.
[0047] (b) Predicted exposure for a 75 kg person.
[0048] (c) For NHP, 2 mg/kg (single dosing plasma Cmax and AUC_{inf} were the mean values.

[0049] FIG. 25 is a table showing the percent reduction in PCSK9 human subjects at different doses of an ABE mRNA MA004 and guide RNA 346 formulated in an LNP described herein based on predictive PK-PD modeling and broken out by human subject body weight and equivalent and 3-fold higher potency in humans than NHPs. PCSK9% reduction=100%−PCSK9% remaining relative to baseline. This is just one method of predicting the human dosing and other factors might affect the particular mRNA used and the assay implemented.

[0050] FIG. 26 shows relative editing percentage of an off-target candidate site B2 in primary human hepatocytes transfected with the referenced ABE mRNA and the noted ANGPTL3 guide RNAs GA441, GA475 and GA476. The relative editing percentage of each sample was normalized to the GA441/MA004 sample for site B2.

[0051] FIG. 27 shows relative editing percentage of an off-target candidate site B6 in primary human hepatocytes transfected with the referenced ABE mRNA and the noted ANGPTL3 guide RNAs GA441, GA475 and GA476. The relative editing percentage of each sample was normalized to the GA441/MA004 sample for site B6.

[0052] FIG. 28A illustrates an exemplary scheme of the gene editing system comprising a guide nucleic acid. The guide nucleic acid comprises a spacer sequence with a first exemplary motif gRNAs GA837, GA693 and GA749 disclosed herein are embodiments of this motif.

[0053] FIG. 28B illustrates another exemplary scheme of the gene editing system comprising a guide nucleic acid. The guide nucleic acid comprises a spacer sequence with a second exemplary motif gRNAs GA745, GA692 and GA748 disclosed herein are embodiments of this motif.

[0054] FIG. 28C illustrates another exemplary scheme of the gene editing system comprising a guide nucleic acid. The guide nucleic acid comprises a spacer sequence with a third exemplary motif gRNAs GA682, GA723 and GA746 disclosed herein are embodiments of this motif.

[0055] FIG. 28D illustrates another exemplary scheme of the gene editing system comprising a guide nucleic acid. The guide nucleic acid comprises a spacer sequence with a fourth exemplary motif gRNAs GA691, GA724 and GA747 disclosed herein are embodiments of this motif.

[0056] FIG. 29 shows the percent on target editing of the target gene ANGPTL3 results from the initial on-target in vitro screening for the guide nucleic acids comprising the spacer sequences (guide nucleic acids GA675-GA684) under MessengerMax transfection conditions. GA441 was used as a control. Primary human hepatocyte (PHH) cells (lot STL) were used for this study. Each guide was screened at the following concentrations: 5,000 ng/mL, 2,500 ng/mL, 1,250 ng/mL, and 625 ng/mL, the results of which are represented by the columns in decreasing concentration order from left to right in the graph for each guide.

[0057] FIG. 30 shows the percent on target editing of the target gene ANGPTL3 results from the initial on-target screening for the guide nucleic acids comprising the spacer sequences (guide nucleic acids GA685-GA694) and control guide RNA GA441 under MessengerMax transfection conditions in PHH cells (lot STL). Each guide was screened at the following concentrations: 5,000 ng/mL, 2,500 ng/mL, 1,250 ng/mL, and 625 ng/mL, the results of which are represented by the columns in decreasing concentration order from left to right in the graph for each guide.

[0058] FIG. 31 shows the results of the in vitro off-target (OT1) editing based on ANGPTL3 guide nucleic acids comprising the spacer sequences of GA675-GA684 and control guide RNA GA441 under MesssengerMax transfection conditions in PHH cells (lot STL).

[0059] FIG. 32 shows the results of the in vitro off-target (OT1) editing based on ANGPTL3 guide nucleic acids comprising the spacer sequences of GA685-GA694 and control guide RNA GA441 under MesssengerMax transfection conditions in PHH cells (lot STL).

[0060] FIG. 33 shows the results from the initial in vitro on-target screening for ANGPTL3 guide nucleic acids comprising the additional spacer sequences of GA695-GA715 and control guide RNA GA441 by MessengerMax transfection conditions in PHH cells (lot STL).

[0061] FIG. 34 shows the in vitro on-target and select off-target (OT1 and OT3 sites) editing results from a follow-up experiment with guide nucleic acids (GA675, GA677, GA678, GA680, GA682, GA683, GA685-GA695) comprising selected spacer sequences and ANGPTL3 control guide RNA GA441 by MessengerMax transfection in PHH cells (lot IRZ).

[0062] FIG. 35A shows the results of a SureSelect in vitro study of target and off-target (OT1, OT2, OT3 and other OTs) editing, using 50 ng DNA input, of 16 ANGPTL3 guide nucleic acids comprising selected spacer sequences and ANGPTL3 control guide RNA GA441 under MessengerMax transfection conditions in PHH cells (lots IRZ).

[0063] FIG. 35B shows the results of a SureSelect in vitro study of on-target and off-target (OT1, OT2, OT3 and other OTs) editing, using 150 ng DNA input, of 10 ANGPTL3 guide nucleic acids comprising selected spacer sequences and ANGPTL3 control guide RNA GA441 under MessengerMax transfection conditions in PHH cells (lot IRZ).

[0064] FIGS. 36A-36B shows the results from LNP transfection experiments using various ANGPTL3 guides. FIG. 36A shows the on-target in vitro editing results from the use of LNPs for transfection in PHH cells (lot IRZ) at two different doses of LNP. FIG. 36B shows the off-targeting editing obtained from the same LNPs transfection experiment for only one dose, except for the control. The LNPs used in these studies are described in Table. 5.

[0065] FIG. 37 shows the results of a SureSelect in vitro study of ANGPTL3 on-target and off-target (OT1, OT2, OT3 and other OTs) editing resulting from the LNP transfection experiments in PHH cells (lot IRZ). The LNPs used in these studies are described in Table. 5.

[0066] FIG. 38A shows a subset of the SureSelect in vitro on-target and off-target (OT1, OT2, OT3 and other OTs) editing results of the LNP transfection experiments in PHH cells (lot IRZ). The LNPs used in these studies are described in Table. 5.

[0067] FIG. 38B shows the Targeted Amplicon in vitro on-target and OT1 editing result of the same subset data, of the LNP transfection experiments.

[0068] FIG. 39A shows a subset of the SureSelect in vitro on-target and off-target (OT1, OT2, OT3 and other OTs) editing results of the MessengarMax transfection experiments in PHH cells (lot IRZ).

[0069] FIG. 39B shows the Targeted Amplicon in vitro on-target and off-targets OT1 and OT3 editing result of the same subset data of the MessengarMax transfection experiments.

[0070] FIG. 40 shows the results of an in vitro on-target dose-response study of ANGPTL3 editing produced by different LNP formulations comprising spacer-modified ANGPTL3 guide nucleic acids in PHH cells (lot IRZ) assessed using Targeted Amplicon sequencing. Three digits after decimal point following formulation, gRNA and mRNA IDs indicate lot or batch number of the respective formulation, gRNA and mRNA. The LNPs used in these studies are described in Table 5.

[0071] FIGS. 41A-41B is a comparative illustration of the off-target editing percentages data produced by different LNP formulations comprising ANGPTL3 guide nucleic acids with various modified-spacer sequences as specified and described herein. FIG. 41A shows the in vitro off-target editing results using OT1 primer. FIG. 41B shows the off-target editing results using OT3 primer. Three digits after decimal point following formulation, gRNA and mRNA IDs indicate lot or batch number of the respective formulation, gRNA and mRNA. The LNPs used in these studies are described in Table 5.

[0072] FIG. 42 shows the results of an in vitro on-target dose-response study of ANGPTL3 editing using an LNP containing GA837 and MA079 in PHH cells from four different donors (lots NFX, GNA, IRZ, and LFQ) assessed using Targeted Amplicon sequencing. The LNP (VF1542) is described in Table 5.

[0073] FIG. 43A shows results of an in vitro on-target ANGPTL3 editing results (as net editing of treated minus untreated samples) of LNP, containing GA837 and MA079, transfected at a single dose in PHH cells (lot IRZ) for two biological replicates. The average net editing % shown above each bar is derived from two technical replicates. The LNP (VF1542) is described in Table 5.

[0074] FIG. 43B shows the OGM (optical genome mapping) analysis of genomic DNA from one replicate (Replicate 1) of the same subset of ANGPTL3 editing data of FIG. 43A. Circos plots show all SV (structural variations) categories (insertions, duplications, deletions, inversions, and translocations) for the individual Untreated Control (left) and ABE-treated (i.e., LNP (VF1542)-treated) (middle) samples. The Bionano Dual analysis pipeline was used to identify SVs unique to the treatment condition. As indicated by the clear ABE-Untreated Control Circos plot (right), notably no unique SVs were identified. The gRNA, mRNA and LNP formulations are the same as FIG. 43A.

[0075] FIG. 44A shows the hepatic ANGPTL3 on-target editing by selected (cyno equivalent) spacer-modified guide nucleic acids GA347, GA663, GA666, GA668, GA665, GA720 comprising the same spacer sequences and mRNA MA004 in LNP treated NHPs. FIG. 44B shows the corresponding ANGPTL3 protein reduction 15 days after a single dose IV administration of the LNPs. The LNPs used in this study are described in Table 6.

[0076] FIG. 45 shows the in vitro on-target editing percentage by selected (cyno equivalent) spacer-modified guide nucleic acids GA347, GA663, GA666, GA668, GA665, GA720 in LNPs in PCH. Corresponding human gRNA IDs with equivalent spacer sequences are listed at the bottom. The LNPs used in this study are described in Table 6.

[0077] FIG. 46 shows hepatic ANGPTL3 on-target editing in NHP after IV infusion a single dose of LNP constituted with selected spacer-modified guide nucleic acids GA347, GA668, GA748 and GA749 comprising the same spacer sequences and mRNA MA079. The editing was assayed 15 days after injection to Cynomolgus monkeys, achieved >54% liver ANGPTL3 editing. The LNPs used in this study are described in Table 6.

[0078] FIG. 47 shows the spacer-modified guide nucleic acids comprising same spacer sequences achieved significant reduction in plasma ANGPTL3 protein 15 days post dosing in NHP. All spacer-modified guide nucleic acid produced >90% reduction in plasma ANGPTL3 protein at all dose level evaluated. The LNPs used in this study are described in Table 6.

### DETAILED DESCRIPTION

[0079] Certain specific details of this description are set forth in order to provide a more thorough understanding of various aspects and embodiments. However, one skilled in the art will understand that the present disclosure may be practiced without certain of the details herein disclosed. In other instances, well-known structures have not been shown or described in detail to avoid unnecessarily obscuring descriptions of the embodiments.

[0080] Unless otherwise defined, all technical and scientific terms used herein have the same meaning as commonly understood by one of ordinary skill in the art to which this disclosure belongs. Although methods and materials similar or equivalent to those described herein can be used in the practice or testing of the present disclosure, suitable methods, and materials are described below. Further, headings provided herein are for convenience only and do not interpret the scope or meaning of the claimed disclosure. It is contemplated that any embodiment discussed in this specification can be implemented with respect to any method or composition of the present disclosure, and vice versa. Furthermore, compositions of the present disclosure can be used to achieve methods of the present disclosure.

### Definitions

[0081] To facilitate an understanding of the present disclosure, a number of terms and phrases are defined below.

[0082] As used in this specification and the appended claims, the singular forms “a,” “an,” and “the” include plural referents unless the content clearly dictates otherwise.

[0083] It should also be noted that the term “or” is generally employed in its sense including “and/or” unless the content clearly dictates otherwise. The terms “and/or” and “any combination thereof” and their grammatical equivalents as used herein, can be used interchangeably. These terms can convey that any combination is specifically contemplated. Solely for illustrative purposes, the following phrases “A, B, and/or C” or “A, B, C, or any combination thereof” can mean “A individually; B individually; C individually; A and B; B and C; A and C; and A, B, and C.” The term “or” can be used conjunctively or disjunctively, unless the context specifically refers to a disjunctive use.

[0084] The term “about” or “approximately” can mean within an acceptable error range for the particular value as determined by one of ordinary skill in the art, which will depend in part on how the value is measured or determined, i.e., the limitations of the measurement system. For example, “about” can mean within 1 or more than 1 standard deviation, per the practice in the art. Alternatively, “about” can mean a range of up to 20%, up to 10%, up to 5%, or up to 1% of a given value. Alternatively, particularly with respect to biological systems or processes, the term can mean within an order of magnitude, within 5-fold, and more preferably within 2-fold, of a value. Where particular values are described in the application and claims, unless otherwise stated the term “about” meaning within an acceptable error range for the particular value should be assumed.

[0085] As used in this specification and claim(s), the words “comprising” (and any form of comprising, such as “comprise” and “comprises”), “having” (and any form of having, such as “have” and “has”), “including” (and any form of including, such as “includes” and “include”) or “containing” (and any form of containing, such as “contains” and “contain”) are inclusive or open-ended and do not exclude additional, unrecited elements or method steps.

[0086] As used herein, “some embodiments,” “an embodiment,” “one embodiment,” “embodiments” or “other embodiments” means that a particular feature, structure, or characteristic described in connection with the embodiments is included in at least some embodiments, but not necessarily all embodiments, of the present disclosures.

[0087] The term “nucleic acid” as used herein refers to a polymer containing at least two nucleotides (i.e., deoxyribonucleotides or ribonucleotides) in either single- or double-stranded form and includes DNA and RNA, hybrids of DNA and RNA, and combinations thereof. The term “nucleic acid” as used herein also refers to a polymer containing at least two chemically modified nucleotides (i.e., deoxyribonucleotides or ribonucleotides) in either single- or double-stranded form and includes DNA and RNA, hybrids of DNA and RNA, and combinations thereof.

[0088] The term “nucleotide” refers to a molecule that contains a sugar deoxyribose (DNA) or ribose (RNA), a base, and a phosphate group. Nucleotides are linked together through the phosphate groups. “Bases” include purines and pyrimidines, which further include natural compounds adenine, thymine, guanine, cytosine, uracil, inosine, and natural analogs, and synthetic derivatives of purines and pyrimidines, which include, but are not limited to, modifications which place new reactive groups such as, but not limited to, amines, alcohols, thiols, carboxylates, and alkylhalides.

[0089] A nucleic acid includes any oligonucleotide or polynucleotide, with fragments containing up to 60 nucleotides generally termed oligonucleotides, and longer fragments termed polynucleotides. A deoxyribo-oligonucleotide consists of a 5-carbon sugar called deoxyribose joined covalently to phosphate at the 5′ and 3′ carbons of this sugar to form an alternating, unbranched polymer. A ribooligonucleotide consists of a similar repeating structure where the 5-carbon sugar is ribose. Accordingly, the terms “polynucleotide” and “oligonucleotide” can refer to a polymer or oligomer of nucleotide or nucleoside monomers consisting of naturally-occurring bases, sugars and inter-sugar (backbone) linkages. Additionally, nucleic acids include nucleic acids containing known nucleotide analogs or modified backbone residues or linkages, which are synthetic, nonstandard, and/or non-naturally occurring, and which have similar binding properties as the reference nucleic acid. The nucleic acid may be modified at the base moiety (e.g., at one or more atoms that typically are available to form a hydrogen bond with a complementary nucleotide and/or at one or more atoms that are not typically capable of forming a hydrogen bond with a complementary nucleotide), sugar moiety, or phosphate backbone. Backbone modifications can include, but are not limited to, a phosphorothioate, a phosphorodithioate, a phosphoroselenoate, a phosphorodiselenoate, a phosphoroanilothioate, a phosphoraniladate, a phosphoramidate, and a phosphorodiamidate linkage. A phosphorothioate linkage substitutes a sulfur atom for a non-bridging oxygen in the phosphate backbone and delays nuclease degradation of oligonucleotides. A phosphorodiamidate linkage (N3′∝P5′) allows preventing nuclease recognition and degradation. Backbone modifications can also include having peptide bonds instead of phosphorous in the backbone structure (e.g., N-(2-aminoethyl)-glycine units linked by peptide bonds in a peptide nucleic acid), or linking groups including carbamate, amides, and linear and cyclic hydrocarbon groups. Oligonucleotides with modified backbones are reviewed in Micklefield, Backbone modification of nucleic acids: synthesis, structure and therapeutic applications, Curr. Med. Chem., 8 (10): 1157-79, 2001 and Lyer et al., Modified oligonucleotides-synthesis, properties and applications, Curr. Opin. Mol. Ther., 1 (3): 344-358, 1999.

[0090] Nucleic acid molecules described herein may contain a sugar moiety that comprises ribose or deoxyribose, as present in naturally occurring nucleotides, or a modified sugar moiety or sugar analog. The examples of modified sugar moieties include, but are not limited to, 2′-O-methyl, 2′-O-methoxyethyl, 2′-O-aminoethyl, 2′-Fluoro, N3′→P5′ phosphoramidate, 2′dimethylaminooxyethoxy, 2′ 2′dimethylaminoethoxyethoxy, 2′-guanidinium, 2′-O-guanidinium ethyl, carbamate modified sugars, and bicyclic modified sugars. 2′-O-methyl or 2′-O-methoxyethyl modifications promote the A-form or RNA-like conformation in oligonucleotides, increase binding affinity to RNA, and have enhanced nuclease resistance. Modified sugar moieties can also include having an extra bridge bond (e.g., a methylene bridge joining the 2′-O and 4′-C atoms of the ribose in a locked nucleic acid) or sugar analog such as a morpholine ring (e.g., as in a phosphorodiamidate morpholino). Examples of such analogs and/or modified residues include, but are not limited to diaminopurine, 5-fluorouracil, 5-bromouracil, 5-chlorouracil, 5-iodouracil, hypoxanthine, xantine, 4-acetylcytosine, 5-(carboxyhydroxylmethyl)uracil, 5-carboxymethylaminomethyl-2-thiouridine, 5-carboxymethylaminomethyluracil, dihydrouracil, beta-D-galactosylqueosine, inosine, N6-isopentenyladenine, 1-methylguanine, 1-methylinosine, 2,2-dimethylguanine, 2-methyladenine, 2-methylguanine, 3-methylcytosine, 5-methylcytosine, N6-adenine, 7-methylguanine, 5-methylaminomethyluracil, 5-methoxyaminomethyl-2-thiouracil, beta-D-mannosylqueosine, 5′-methoxycarboxymethyluracil, 5-methoxyuracil, 2-methylthio-N6-isopentenyladenine, uracil-5-oxyacetic acid (v), wybutoxosine, pseudouracil, queosine, 2-thiocytosine, 5-methyl-2-thiouracil, 2-thiouracil, 4-thiouracil, 5-methyluracil, uracil-5-oxyacetic acid methylester, 5-methyl-2-thiouracil, 3-(3-amino-3-N-2-carboxypropyl) uracil, (acp3)w, 2,6-diaminopurine, methyl phosphonates, chiral-methyl phosphonates, 2′-O-methyl ribonucleotides, peptide-nucleic acids (PNAs), and the like. In some cases, nucleotides may include modifications in their phosphate moieties, including modifications to a triphosphate moiety. Non-limiting examples of such modifications include phosphate chains of greater length (e.g., a phosphate chain having, 4, 5, 6, 7, 8, 9, 10 or more phosphate moieties) and modifications with thiol moieties (e.g., alpha-thiotriphosphate and beta-thiotriphosphates). Such modified or substituted oligonucleotides are often preferred over native forms because of properties such as, for example, enhanced cellular uptake, reduced immunogenicity, and increased stability in the presence of nucleases. Thus, the terms “polynucleotide” and “oligonucleotide” can also include polymers or oligomers comprising non-naturally occurring monomers, or portions thereof, which function similarly.

[0091] Unless otherwise indicated, a particular nucleic acid sequence also implicitly encompasses conservatively modified variants thereof (e.g., degenerate codon substitutions), alleles, orthologs, SNPs, and complementary sequences as well as the sequence explicitly indicated. Specifically, degenerate codon substitutions may be achieved by generating sequences in which the third position of one or more selected (or all) codons is substituted with mixed-base and/or deoxyinosine residues (Batzer et al., Nucleic Acid Res., 19:5081 (1991); Ohtsuka et al., J. Biol. Chem., 260:2605-2608 (1985); Rossolini et al., Mol. Cell. Probes, 8:91-98 (1994)).

[0092] The term “nucleoside” refers to a compound that consists of a base combined with deoxyribose or ribose. Nucleosides include but not limited to, ribonucleoside and deoxyribonucleoside. Nucleosides are phosphorylated to give nucleotides. Ribonucleosides include adenosine (A), guanosine (G), 5-methyluridine (m⁵U), uridine (U), and cytidine (C). Deoxyribonucleosides include deoxyadenosine (dA), deoxyguanosine (dG), deoxythymidine (dT), deoxyuridine (dU), deoxycytidine (dC). The deoxyribose or ribose (i.e., sugar moieties) can be modified. The examples of modified sugar moieties include, but are not limited to, 2′-O-methyl, 2′-O-methoxyethyl, 2′-O-aminoethyl, 2′-Fluoro, N3′→P5′ phosphoramidate, 2′dimethylaminooxyethoxy, 2′ 2′dimethylaminoethoxyethoxy, 2′-guanidinium, 2′-O-guanidinium ethyl, carbamate modified sugars, and bicyclic modified sugars. 2′-O-methyl or 2′-O-methoxyethyl modifications promote the A-form or RNA-like conformation in oligonucleotides, increase binding affinity to RNA, and have enhanced nuclease resistance. Modified sugar moieties can also include having an extra bridge bond (e.g., a methylene bridge joining the 2′-O and 4′-C atoms of the ribose in a locked nucleic acid) or sugar analog such as a morpholine ring (e.g., as in a phosphorodiamidate morpholino). Examples of such analogs and/or modified residues include, but are not limited to diaminopurine, 5-fluorouracil, 5-bromouracil, 5-chlorouracil, 5-iodouracil, hypoxanthine, xantine, 4-acetylcytosine, 5-(carboxyhydroxylmethyl)uracil, 5-carboxymethylaminomethyl-2-thiouridine, 5-carboxymethylaminomethyluracil, dihydrouracil, beta-D-galactosylqueosine, inosine, N6-isopentenyladenine, 1-methylguanine, 1-methylinosine, 2,2-dimethylguanine, 2-methyladenine, 2-methylguanine, 3-methylcytosine, 5-methylcytosine, N6-adenine, 7-methylguanine, 5-methylaminomethyluracil, 5-methoxyaminomethyl-2-thiouracil, beta-D-mannosylqueosine, 5′-methoxycarboxymethyluracil, 5-methoxyuracil, 2-methylthio-N6-isopentenyladenine, uracil-5-oxyacetic acid (v), wybutoxosine, pseudouracil, queosine, 2-thiocytosine, 5-methyl-2-thiouracil, 2-thiouracil, 4-thiouracil, 5-methyluracil, uracil-5-oxyacetic acid methylester, 5-methyl-2-thiouracil, 3-(3-amino-3-N-2-carboxypropyl) uracil, (acp3)w, 2,6-diaminopurine, methyl phosphonates, chiral-methyl phosphonates, 2′-O-methyl ribonucleotides, peptide-nucleic acids (PNAs), and the like.

[0093] The term “deoxyribonucleotide” and “2′-deoxyribonucleotide” are used interchangeably and refer to both unmodified deoxyribonucleotide and chemically modified deoxyribonucleotide unless otherwise specified.

[0094] The term “motif,” as used herein, refers to a pattern or an arrangement of specific nucleotides, for example, a motif can refers to (i) one or more 2′-deoxyribonucleotides within a spacer, (ii) a combination of one or more 2′-deoxyribonucleotides and one or more ribonucleotides within the spacer, (iii) a combination of one or more 2′-deoxyribonucleotides, one or more ribonucleotides, and one or more 2′-OMe ribonucleotides within the spacer, wherein the 2′-OMe ribonucleotide can be at the 5′-end or at the 3′-end of a 2′-deoxyribonucleotide, (iv) a combination of one or more 2′-deoxyribonucleotides and one or more 2′-OMe ribonucleotides within the spacer, wherein the 2′-OMe ribonucleotide can be placed/located at the 5′-end or at the 3′-end of the 2′deoxynucleotides, or (v) any of the motifs disclosed earlier (i-iv) further comprising a phosphonothioate backbone.

[0095] The term “vector,” as used herein, refers to a nucleic acid molecule capable of transporting another nucleic acid to which it has been linked. In some examples, a vector is an expression vector that is capable of directing the expression of nucleic acids to which they are operatively linked. The term “operably linked,” as used herein, means that the nucleotide sequence of interest is linked to regulatory sequence(s) in a manner that allows for expression of the nucleotide sequence. The term “regulatory sequence,” as used herein, includes, but is not limited to promoters, enhancers and other expression control elements. Such regulatory sequences are well known in the art and are described, for example, in Goeddel; Gene Expression Technology: Methods in Enzymology 185, Academic Press, San Diego, CA (1990). Examples of expression vectors include, but are not limited to, plasmid vectors, viral vectors based on vaccinia virus, poliovirus, adenovirus, adeno-associated virus, SV40, herpes simplex virus, human immunodeficiency virus, retrovirus (e.g., Murine Leukemia Virus, spleen necrosis virus, and vectors derived from retroviruses such as Rous Sarcoma Virus, Harvey Sarcoma Virus, avian leukosis virus, a lentivirus, human immunodeficiency virus, myeloproliferative sarcoma virus, and mammary tumor virus) and other recombinant vectors.

[0096] The term “off-targeting,” “off-site targeting,” or “off-target effect” as used herein refers to when the spacer of the guide nucleic acid binds to a sequence of the genome other than the target sequence to which the spacer was specifically designed to bind. The resulting unintentional binding would lead to unintentional editing of genes other than the target gene.

[0097] As used herein, the terms “protein,” “polypeptide,” and “peptide” are used interchangeably and refer to a polymer of amino acid residues linked via peptide bonds and which may be composed of two or more polypeptide chains. The terms “polypeptide,” “protein,” and “peptide” refer to a polymer of at least two amino acid monomers joined together through amide bonds. An amino acid may be the L-optical isomer or the D-optical isomer. More specifically, the terms “polypeptide,” “protein,” and “peptide” refer to a molecule composed of two or more amino acids in a specific order; for example, the order as determined by the base sequence of nucleotides in the gene or RNA coding for the protein. Proteins are essential for the structure, function, and regulation of the body's cells, tissues, and organs, and each protein has unique functions. Examples are hormones, enzymes, antibodies, and any fragments thereof. In some cases, a protein can be a portion of the protein, for example, a domain, a subdomain, or a motif of the protein. In some cases, a protein can be a variant (or mutation) of the protein, wherein one or more amino acid residues are inserted into, deleted from, and/or substituted into the naturally occurring (or at least a known) amino acid sequence of the protein. A protein or a variant thereof can be naturally occurring or recombinant. Methods for detection and/or measurement of polypeptides in biological material are well known in the art and include, but are not limited to, Western-blotting, flow cytometry, ELISAs, RIAs, and various proteomics techniques. An exemplary method to measure or detect a polypeptide is an immunoassay, such as an ELISA. This type of protein quantitation can be based on an antibody capable of capturing a specific antigen, and a second antibody capable of detecting the captured antigen. Exemplary assays for detection and/or measurement of polypeptides are described in Harlow, E. and Lane, D. Antibodies: A Laboratory Manual, (1988), Cold Spring Harbor Laboratory Press.

[0098] The term “sequence identity,” as used herein, refers to the amount of nucleotide or amino acid which match exactly between two different sequences. When comparing RNA and DNA sequences Uracil and Thymine bases are considered to be the same base. Gaps are not counted and the measurement is typically in relation to the shorter of the two sequences.
[0099] For example, for nucleotide sequences:
[0100] A: AAGGCTT
[0101] B: AAGGC
[0102] C: AAGGCAT
[0103] Here identity (A,B)=100% (5 identical nucleotides/min(length(A),length(B))).

[0104] Identity(B,C)=100%, but identity(A,C)=85% ((6 identical nucleotides/7). So 100% identity does not mean two sequences are the same.

[0105] For amino acid sequences:
[0106] A: Ala Ala Gly Gly Gln His His
[0107] B: Ala Ala Gly Gly Gln
[0108] C: Ala Ala Gly Gly Gln Ala His
[0109] Here identity (A,B)=100% (5 identical amino acids/min(length(A), length(B))).
[0110] Identity (B,C)=100%, but identity(A,C)=85% ((6 identical amino acids/7).

[0111] The term “sequence similarity,” as used herein, can be described as an optimal matching problem that finds the minimal number of edit operations (inserts, deletes, and substitutions) in order to transform the one sequence into an exact copy of the other sequence being aligned (edit distance). Using this, the percentage sequence similarity of the examples above are sim(A,B)=60%, sim(B,C)=60%, sim(A,C)=86% (semi-global, sim=1−(edit distance/unaligned length of the shorter sequence)).

[0112] A “subject” in need thereof, refers to an individual who has a disease, a symptom of the disease, or a predisposition toward the disease, with the purpose to cure, heal, alleviate, relieve, alter, remedy, ameliorate, improve, or affect the disease, the symptom of the disease, or the predisposition toward the disease. In some embodiments, the subject has hypercholesterolemia. In some embodiments, the subject has atherosclerotic vascular disease. In some embodiments, the subject has hypertriglyceridemia. In some embodiments, the subject has diabetes. The term “subject” or “patient” encompasses mammals. Examples of mammals include, but are not limited to, any member of the mammalian class: humans, non-human primates such as chimpanzees, and other apes and monkey species; farm animals such as cattle, horses, sheep, goats, swine; domestic animals such as rabbits, dogs, and cats; laboratory animals including rodents, such as rats, mice and guinea pigs, and the like.

[0113] The term “condition,” as used herein, includes diseases, disorders, and susceptibilities. In some embodiments, the condition is an atherosclerotic vascular disease. In some embodiments, the condition is a hypertriglyceridemia. In some embodiments, the condition is a diabetes.

[0114] The term “atherosclerosis” or “atherosclerotic vascular disease,” as used herein, refers to a disease in which the inside of an artery narrows due to the buildup of plaque. In some instances, it may result in coronary artery disease, stroke, peripheral artery disease, or kidney problems.

[0115] The term “hypertriglyceridemia,” as used herein, refers to high (hyper-) blood levels (-emia) of triglycerides, the most abundant fatty molecule in most organisms. Elevated levels of triglycerides can be associated with atherosclerosis, even in the absence of hypercholesterolemia (high cholesterol levels), and can predispose to cardiovascular disease. Very high triglyceride levels can increase the risk of acute pancreatitis. Hypertriglyceridemia can be associated with overeating, obesity, diabetes mellitus and insulin resistance, excess alcohol consumption, kidney failure, nephrotic syndrome, genetic predisposition (e.g., familial combined hyperlipidemia, i.e., Type II hyperlipidemia), lipoprotein lipase deficiency, lysosomal acid lipase deficiency, cholesteryl ester storage disease, certain medications (e.g., isotretinoin, hydrochlorothiazide diuretics, beta blockers, protease inhibitors), hypothyroidism (underactive thyroid), systemic lupus erythematosus and associated autoimmune responses, glycogen storage disease type 1, propofol, or HIV medications.

[0116] The term “diabetes,” as used herein, refers to a group of metabolic disorders characterized by a high blood sugar level over a prolonged period of time. Diabetes can be type 1 diabetes that results from the pancreas's failure to produce enough insulin due to loss of beta cells. Diabetes can be type 2 diabetes characterized by insulin resistance, a condition in which cells fail to respond to insulin properly. Diabetes can be gestational diabetes that occurs when pregnant women without a previous history of diabetes develop high blood sugar levels.

[0117] The term “low-density lipoprotein (LDL),” as used herein, refers to a microscopic blob made up of an outer rim of lipoprotein and a cholesterol center. LDL can have a highly hydrophobic core composed of a polyunsaturated fatty acid known as linoleate and hundreds to thousands esterified and unesterified cholesterol molecules. The core of LDL can also carry triglycerides and other fats and can be surrounded by a shell of phospholipids and unesterified cholesterol.

[0118] The term “high-density lipoprotein (HDL),” as used herein, refers to the smallest lipoprotein particles. Plasma enzyme lecithin-cholesterol acyltransferase (LCAT) can convert the free cholesterol into cholesteryl, which is then sequestered into the core of the lipoprotein particle, eventually causing the newly synthesized HDL to assume a spherical shape. HDL particles can increase in size as they circulate through the bloodstream and incorporate more cholesterol and phospholipid molecules from cells and other lipoproteins.

[0119] The term “cholesterol,” as used herein, refers to a lipid with a unique structure composed of four linked hydrocarbon rings forming the bulky steroid structure. The term “triglyceride,” as used herein, refers to a tri-ester composed of a glycerol bound to three fatty acid molecules. In some embodiments, the fatty acids are saturated or unsaturated fatty acids.

[0120] The terms “treat,” “treating,” or “treatment,” and its grammatical equivalents as used herein, can include alleviating, abating, or ameliorating at least one symptom of a disease or a condition, preventing additional symptoms, inhibiting the disease or the condition, e.g., delaying, decreasing, suppressing, attenuating, diminishing, arresting, or stabilizing the development or progression of a disease or the condition, relieving the disease or the condition, causing regression of the disease or the condition, relieving a condition caused by the disease or the condition, reducing disease severity, or stopping the symptoms of the disease or the condition either prophylactically and/or therapeutically. “Treating” also includes lessening the frequency of occurrence or recurrence, or the severity, of any symptoms or other ill effects related to a disease or condition and/or the side effects associated with the disease or condition. “Treating” does not necessarily require curative results. It is appreciated that, although not precluded, treating a disorder or condition also does not require that the disorder, condition, or symptoms associated therewith be completely eliminated. The term “treating” encompasses the concept of “managing” which refers to reducing the severity of a particular disease or disorder in a patient or delaying its recurrence, e.g., lengthening the period of remission in a patient who had suffered from the disease. “Treating” may refer to the application or administration or a composition to a subject after the onset, or suspected onset, of a disease or condition.

[0121] The term “treating” further encompasses the concept of “prevent,” “preventing,” and “prevention.” The terms “prevent,” “preventing,” and “prevention,” as used herein, refer to a decrease in the occurrence of pathology of a condition in a subject, who does not have, but is at risk of or susceptible to developing a disease or condition. The prevention may be complete, e.g., the total absence of pathology of a condition in a subject. The prevention may also be partial, such that the occurrence of pathology of a condition in a subject is less than that which would have occurred without the present disclosure.

[0122] By “treating or preventing a condition,” for example, as compared with an equivalent untreated control, alleviating a symptom of a disorder may involve reduction or degree of prevention at least 3%, 5%, 10%, 20%, 40%, 50%, 60%, 80%, 90%, 95%, 98%, 99%, 99.5%, 99.9%, or 100% as measured by any standard technique. In some embodiments, alleviating a symptom of a disorder may involve reduction or degree of prevention by at least 2, 3, 4, 5, 10, 20, 25, 30, 40, 50, 60, 70, 80, 90, 100, 200, 300, 400, 500, 600, 700, 800, 900, 1000, 2000, 3000, 4000, 5000, 6000, 7000, 8000, 9000, or 10000 fold as compared with an equivalent untreated control.

[0123] As used therein, “delaying” the development of a disease means to defer, hinder, slow, retard, stabilize, and/or postpone progression of the disease. This delay can be of varying lengths of time, depending on the history of the disease and/or individuals being treated. A method that “delays” or alleviates the development of a disease, or delays the onset of the disease, is a method that reduces probability of developing one or more symptoms of the disease in a given time frame and/or reduces extent of the symptoms in a given time frame, when compared to not using the method. Such comparisons are typically based on clinical studies, using a number of subjects sufficient to give a statistically significant result.

[0124] “Development” or “progression” of a disease means initial manifestations and/or ensuing progression of the disease. Development of the disease can be detectable and assessed using standard clinical techniques as well known in the art. However, development also refers to progression that may be undetectable. For purpose of this disclosure, development or progression refers to the biological course of the symptoms. “Development” includes occurrence, recurrence, and onset.

[0125] As used herein “onset” or “occurrence” of a disease includes initial onset and/or recurrence.

[0126] “Administering” and its grammatical equivalents as used herein can refer to providing pharmaceutical compositions described herein to a subject or a patient. Conventional methods, known to those of ordinary skill in the art of medicine, can be used to administer the composition to the subject, depending upon the type of disease to be treated or the site of the disease. For example, the composition can be administered, e.g., orally, parenterally, by inhalation spray, topically, rectally, nasally, buccally, vaginally, via an implanted reservoir, or via infusion. One or more such routes can be employed.

[0127] The term “parenteral” as used herein includes subcutaneous, intracutaneous, intravenous, intramuscular, intraperitoneal, intradermal, intraarterial, intrasynovial, intrasternal, intrathecal, intravascular, intralesional, and intracranial injection or infusion techniques. In addition, it can be administered to the subject via injectable depot routes of administration such as using 1-, 3-, or 6-month depot injectable or biodegradable materials and methods.

[0128] By “co-administering” is meant administering one or more additional therapeutic regimens or agents or treatments and the composition of the disclosure sufficiently close in time to enhance the effect of one or more additional therapeutic agents, or vice versa. In this regard, the composition of the disclosure described herein can be administered simultaneously with one or more additional therapeutic regimens or agents or treatments, at a different time, or on an entirely different therapeutic schedule (e.g., the first treatment can be daily, while the additional treatment is weekly). For example, in embodiments, the secondary therapeutic regimens or agents or treatments are administered simultaneously, prior to, or subsequent to the composition of the disclosure.

[0129] The terms “pharmaceutical composition” and its grammatical equivalents as used herein can refer to a mixture or solution comprising a therapeutically effective amount of an active pharmaceutical ingredient together with one or more pharmaceutically acceptable excipients, carriers, and/or a therapeutic agent to be administered to a subject, e.g., a human in need thereof.

[0130] The term “pharmaceutically acceptable” and its grammatical equivalents as used herein can refer to an attribute of a material which is useful in preparing a pharmaceutical composition that is generally safe, non-toxic, and neither biologically nor otherwise undesirable and is acceptable for veterinary as well as human pharmaceutical use. “Pharmaceutically acceptable” can refer a material, such as a carrier or diluent, which does not abrogate the biological activity or properties of the compound, and is relatively nontoxic, i.e., the material may be administered to a subject without causing undesirable biological effects or interacting in a deleterious manner with any of the components of the pharmaceutical composition in which it is contained.

[0131] A “pharmaceutically acceptable excipient, carrier, or diluent” refers to an excipient, carrier, or diluent that can be administered to a subject, together with an agent, and which does not destroy the pharmacological activity thereof and is nontoxic when administered in doses sufficient to deliver a therapeutic amount of the agent.

[0132] A “pharmaceutically acceptable salt” may be an acid or base salt that is generally considered in the art to be suitable for use in contact with the tissues of human beings or animals without excessive toxicity, irritation, allergic response, or other problem or complication. Such salts include mineral and organic acid salts of basic residues such as amines, as well as alkali or organic salts of acidic residues such as carboxylic acids. Specific pharmaceutical salts include, but are not limited to, salts of acids such as hydrochloric, phosphoric, hydrobromic, malic, glycolic, fumaric, sulfuric, sulfamic, sulfanilic, formic, toluenesulfonic, methanesulfonic, benzene sulfonic, ethane disulfonic, 2-hydroxyethyl sulfonic, nitric, benzoic, 2-acetoxybenzoic, citric, tartaric, lactic, stearic, salicylic, glutamic, ascorbic, pamoic, succinic, fumaric, maleic, propionic, hydroxymaleic, hydroiodic, phenylacetic, alkanoic such as acetic, HOOC—(CH₂)n-COOH where n is 0-4, and the like. Similarly, pharmaceutically acceptable cations include, but are not limited to sodium, potassium, calcium, aluminum, lithium and ammonium. Those of ordinary skill in the art will recognize from this disclosure and the knowledge in the art that further pharmaceutically acceptable salts include those listed by Remington's Pharmaceutical Sciences, 17th ed., Mack Publishing Company, Easton, PA, p. 1418 (1985). In general, a pharmaceutically acceptable acid or base salt can be synthesized from a parent compound that contains a basic or acidic moiety by any conventional chemical method. Briefly, such salts can be prepared by reacting the free acid or base forms of these compounds with a stoichiometric amount of the appropriate base or acid in an appropriate solvent.

[0133] The term “therapeutic agent” can refer to any agent that, when administered to a subject, has a therapeutic, diagnostic, and/or prophylactic effect and/or elicits a desired biological and/or pharmacological effect. Therapeutic agents can also be referred to as “actives” or “active agents.” Such agents include, but are not limited to, cytotoxins, radioactive ions, chemotherapeutic agents, small molecule drugs, proteins, and nucleic acids.

[0134] “A therapeutically effective amount” as used herein refers to the amount of each composition of the present disclosure required to confer therapeutic effect on the subject, either alone or in combination with one or more other therapeutic agents. Hence, as used herein, the term “therapeutically effective amount” means an amount of an agent to be delivered (e.g., nucleic acid, composition, therapeutic agent, prophylactic agent, etc.) that is sufficient, when administered to a subject suffering from or susceptible to a disease, disorder, and/or condition, to treat, improve symptoms of, diagnose, prevent, and/or delay the onset of the disease, disorder, and/or condition. In terms of treatment, a “therapeutically effective amount” is an amount that is sufficient to palliate, ameliorate, stabilize, reverse or slow the progression of a disease or a condition, e.g., an atherosclerotic vascular disease, hypertriglyceridemia, or diabetes. A “therapeutically effective amount” varies, as recognized by those skilled in the art, depending on the particular condition being treated, the severity of the condition, the individual subject parameters including age, physical condition, size, gender and weight, the duration of the treatment, the nature of concurrent therapy (if any), the specific route of administration and like factors within the knowledge and expertise of the health practitioner. These factors are well known to those of ordinary skill in the art and can be addressed with no more than routine experimentation. It is generally preferred that a maximum dose of the individual components or combinations thereof be used, that is, the highest safe dose according to sound medical judgment. It will be understood by those of ordinary skill in the art, however, that a subject may insist upon a lower dose or tolerable dose for medical reasons, psychological reasons or for virtually any other reasons. Additionally, other medication the patient may be receiving will affect the determination of the therapeutically effective amount of the therapeutic agent to administer. Empirical considerations, such as the half-life, generally will contribute to the determination of the dosage. A “therapeutically effective amount” may be of any of the compositions of the disclosure used alone or in conjunction with one or more agents used to treat a condition. A therapeutically effective amount can be administered in one or more administrations.

[0135] An effective initial method to determine a “therapeutically effective amount” may be by carrying out cell culture assays (for example, using neuronal cells) or using animal models (for example, mice, rats, rabbits, dogs or pigs). A dose may be formulated in animal models to achieve a concentration range that includes the IC50 (i.e., the concentration of the composition which achieves a half-maximal inhibition of symptoms) as determined in cell culture. Such information can be used to more accurately determine useful doses in humans. In addition to determining the appropriate concentration range for an disclosure composition to be therapeutically effective, animal models may also yield other relevant information such as preferable routes of administration that will give maximum effectiveness. Adjusting the dose to achieve maximal efficacy in humans based on the methods described above and other methods is well within the capabilities of the ordinarily skilled artisan.

[0136] Ranges provided herein are understood to be shorthand for all of the values within the range. For example, a range of 1 to 50 is understood to include any number, combination of numbers, or sub-range from the group consisting of 1, 2, 3, 4, 5, 6, 7, 8, 9, 10, 11, 12, 13, 14, 15, 16, 17, 18, 19, 20, 21, 22, 23, 24, 25, 26, 27, 28, 29, 30, 31, 32, 33, 34, 35, 36, 37, 38, 39, 40, 41, 42, 43, 44, 45, 46, 47, 48, 49, or 50, as well as all intervening decimal values between the aforementioned integers such as, for example, 1.1, 1.2, 1.3, 1.4, 1.5, 1.6, 1.7, 1.8, and 1.9. With respect to sub-ranges, “nested sub-ranges” that extend from either end point of the range are specifically contemplated. For example, a nested sub-range of an exemplary range of 1 to 50 may comprise 1 to 10, 1 to 20, 1 to 30, and 1 to 40 in one direction, or 50 to 40, 50 to 30, 50 to 20, and 50 to 10 in the other direction.

[0137] The term “protospacer,” or “target sequence” and their grammatical equivalents as used herein can refer to a DNA sequence of a target gene. In the native state, a protospacer is adjacent to a PAM (protospacer adjacent motif). The site of cleavage by an RNA-guided nuclease is within a protospacer sequence.

[0138] The term “spacer” or “spacer sequence” refers to a nucleic acid sequence that is complementary and binds to the complementary strand of the target gene. A spacer can be within a guide nucleic acid (e.g., gRNA, gDRNA).

[0139] The term “base editing,” “gene editing,” “genome editing,” or “gene modification” and its grammatical equivalents as used herein can refer to genetic engineering in which one or more nucleotides are inserted, replaced, or removed from a genome. Gene editing can be performed using a nuclease (e.g., a natural-existing nuclease or an artificially engineered nuclease). Gene modification can include introducing a double stranded break, a non-sense mutation, a frameshift mutation, a splice site alteration, or an inversion in a polynucleotide sequence, e.g., a target polynucleotide sequence.

[0140] The term “base editor” as used herein can refer to an agent that binds a polynucleotide and has nucleobase modifying activity. The base editor can comprise a nucleobase modifying polypeptide (e.g., a deaminase) and a nucleic acid programmable nucleotide binding domain in conjunction with a guide polynucleotide (e.g., guide RNA), or nucleic acids encoding the programmable nucleotide binding domain and the deaminase. The agent can be a biomolecular complex comprising a protein domain having base editing activity, i.e., a domain capable of modifying a base (e.g., A, T, C, G, or U) within a nucleic acid molecule (e.g., DNA), or a nucleic acid encoding the same. The polynucleotide programmable DNA binding domain can be fused or linked to a deaminase domain, resulting in a base editor fusion protein. The base editor can comprise a nucleic acid encoding the base editor fusion protein, e.g., a mRNA encoding the base editor fusion protein. The base editor fusion protein can comprise one or more linkers, for example, peptide linkers. The agent can be a fusion protein comprising a domain having base editing activity. The protein domain having base editing activity can be linked to the guide RNA (e.g., via an RNA binding motif on the guide RNA and an RNA binding domain fused to the deaminase). In some instances, the domain having base editing activity is capable of deaminating a base within a nucleic acid molecule. In some instances, the base editor is capable of deaminating one or more bases within a DNA molecule. In some instances, the base editor is capable of deaminating an adenosine (A) within DNA. The base editor can be an adenosine base editor (ABE). In some instances, the base editor is capable of deaminating a cytosine (C) within DNA. The base editor can be a cytosine base editor (CBE).

[0141] The term “base editor system” refers to a gene editing system for editing a single nucleobase of a target nucleotide sequence. In various embodiments, the base editor system comprises (1) a polynucleotide programmable nucleotide binding domain (e.g., Cas9); (2) a deaminase domain (e.g., an adenosine deaminase or a cytidine deaminase) for deaminating said nucleobase; and (3) one or more guide polynucleotide (e.g., guide RNA). In some embodiments, the base editor system comprises a base editor fusion protein comprising (1) and (2). In some embodiments, the polynucleotide programmable nucleotide binding domain is a polynucleotide programmable DNA binding domain. In some embodiments, the base editor is an adenine or adenosine base editor (ABE). In some embodiments, the base editor is a cytosine base editor (CBE).

[0142] The term “prime editing” as used herein refers to a form of precise genome editing that enables direct, irreversible targeted small insertions, deletions, and base swapping without requiring double-stranded DNA breaks (DSBs), or donor DNA templates. DNA prime editors comprise a catalytically disabled Cas9 nuclease fused to a reverse transcriptase. Prime editing involves a prime editing guide RNA (pegRNA) that is substantially larger than a standard sgRNA used for CRISPR Cas9 editing. The pegRNA comprises a primer binding sequence (PBS) and a template containing the desired RNA sequence added at the 3′ end.

[0143] The term “CRISPR RNA” (crRNA) herein refers to an RNA sequence that can form a complex with one or more Cas proteins (e.g., Cas9) and provides DNA binding specificity to the complex. A crRNA provides DNA binding specificity since it contains a “spacer sequence” that is complementary to a strand of a DNA target sequence. A crRNA further comprises a “repeat sequence” (“tracr RNA mate sequence”) encoded by a repeat region of the CRISPR locus from which the crRNA was derived. A repeat sequence of a crRNA can anneal to sequence at the 5′-end of a tracrRNA. crRNA in native CRISPR systems is derived from a “pre-crRNA” transcribed from a CRISPR locus. A pre-crRNA comprises spacer regions and repeat regions; spacer regions contain unique sequence complementary to a DNA target site sequence. Pre-crRNA in native systems is processed to multiple different crRNAs, each with a guide sequence along with a portion of repeat sequence. CRISPR systems utilize crRNA, for example, for DNA targeting specificity.

[0144] The term “trans-activating CRISPR RNA” (tracrRNA) herein refers to a non-coding RNA used in type II CRISPR systems, and contains, in the 5′-to-3′ direction, (i) a sequence that anneals with the repeat region of CRISPR type II crRNA and (ii) a stem loop-containing portion (Deltcheva et al., Nature 471:602-607). A modified tracrRNA refers to a tracrRNA with modified ribonucleotide (e.g., 2-OMe modified RNA).

[0145] As used herein, the term “guide nucleic acid”, relates to a polynucleotide sequence that can form a complex with a Cas endonuclease and enables the Cas endonuclease to recognize and optionally cleave a DNA target site. The guide nucleic acid can be a single molecule or a double molecule. The guide nucleic acid sequence can be DNA only (gDNA). The DNA can be modified or unmodified. The guide nucleic acid sequence can be RNA only (gRNA). The RNA can be modified or unmodified. The guide nucleic acid sequence can be a combination of DNA and RNA. Optionally, the guide nucleic acid can comprise at least one nucleotide, phosphodiester bond or linkage modification such as, but not limited, to Locked Nucleic Acid (LNA), 5-methyl dC, 2,6-Diaminopurine, 2′-Fluoro A, 2′-Fluoro U, 2′-O-Methyl RNA, Phosphorothioate bond, linkage to a cholesterol molecule, linkage to a polyethylene glycol molecule, linkage to a spacer 18 (hexaethylene glycol chain) molecule, or 5′ to 3′ covalent linkage resulting in circularization. A guide nucleic acid that solely comprises ribonucleic acids is referred to as a “guide RN.” A guide nucleic acid that comprises both RNA and DNA is referred to as a “guide RDNA.”

[0146] “Partial hepatectomy,” as used herein, refers to an operation to remove part of the liver. In some embodiments, partial hepatectomy is used to model liver regeneration in vivo.

[0147] As used herein, a spacer sequence that corresponds to a protospacer is capable of making a modification to a base within the complimentary strand of the target protospacer nucleic acid sequence. a spacer sequence that corresponds to a protospacer sequence may be identical or substantially identical to the protospacer sequence.

[0148] As used herein, “corresponding” refers to a region where a different sequence or component can react to or bind to. For example, a corresponding region of a Cas9 nickase to a scaffold component of a guide RNA refers to a region of the Cas9 nickase that can react and bind to the scaffold component of a guide RNA. For another example, a spacer sequence corresponds to a protospacer sequence refers to the fact that the spacer sequence binds to the protospacer sequence. The binding might have one or more mis-matches.

### Gene Editing Systems

[0149] The clustered regularly interspaced short palindromic repeat (CRISPR) system has been adopted for gene editing and has revolutionized the biotechnology and life science space. Despite being a powerful gene editing tool, CRISPR has its own drawbacks. One of the major issues is the off-target mutations caused by the system. (Yin et al., Nature Chemical Biology 14, 311-316 (2018)). It has been found that partially replacing the RNA nucleotides (ribonucleosides) from the guide RNA with DNA nucleotides (deoxyribonucleosides) can lead to decreased off-target activity compared to the unmodified guide RNA. Such DNA-RNA chimera guides are also known as CRISPR hybrid DNA-RNA (chRDNA). However, while the chRDNA can reduce the off-target effect, it often does so by sacrificing the on-target editing efficiency. Thus, there remains an urgent need in finding optimized guide nucleic acids for CRISPR systems that would maintain the powerful on-target editing efficiency with low off-targeting effect, particularly in vivo.

[0150] The present disclosure provides a novel gene editing system that offers many of the benefits of using the CRISPR system for gene editing—namely, highly efficient programmable gene editing—while overcoming the limitation of off-target editing. The novel gene editing system described herein achieves efficient gene editing results with reduced off-target effect by using a novel guide nucleic acid to direct a gene editor protein to affect an alteration to a target gene. As disclosed herein, the novel guide nucleic acid is engineered to comprise a mixture of deoxyribonucleotide and ribonucleotide in the spacer sequence comprising at least one deoxyribonucleotide and at least one ribonucleotide in the spacer sequence while retaining its ability to hybridize to the target gene. The number, the position, and the specific modification of the deoxyribonucleotide and/or ribonucleotide in the guide nucleic acid are optimized such that the gene editing system comprising the guide nucleic acid is allowed to perform gene editing with high on-target efficiency but low off-target effect. In some embodiments, the 2′ hydroxyl group on the ribose of the ribonucleotide can be modified to covalently linked to a methyl group. FIGS. 28A-28D provide exemplary gene editing systems with guide nucleic acids comprising exemplary spacer sequences as disclosed herein. As illustrated in FIG. 28A, the exemplary gene editing system (100) comprises a gene editor protein (150) which contains a nucleic acid binding domain that can bind to the target gene (110) and a guide nucleic acid (120). The representative guide nucleic acid (120) comprises a spacer sequence (130) composed of both ribonucleotides (RNA) and deoxyribonucleotides (DNA). The spacer sequence (130) is complementary to a protospacer (160) from the target gene (110). Replacing the ribonucleotides with deoxyribonucleotides at some specific positions of the spacer sequence (130) with 2′-OMe and phosphorothioate backbone chemical modifications results in unique DNA-RNA hybrid sequence motifs at the 5′-end to the spacer sequence (130), which is able to direct the gene editor protein (150) to the target sequence (160) to elicit site-specific on-target gene alteration with reduced off-target effect. Here, the exemplary motif in the spacer sequence (130) is (2′-OMe RNA)(2′-OMe RNA)(DNA)(DNA)(RNA)(DNA)(DNA)(DNA). Note that the specific phosphorothioate backbone modifications are not shown. The guide nucleic acid (120) further comprises a tracrRNA (140) or equivalent thereof at the 3′ end of the spacer sequence (130). The tracrRNA (140) or equivalent thereof recruits a gene editor protein (150) to the target sequence (160) to affect an alteration on the target gene (110). The tracrRNA (140) may be modified. For example, the tracrRNA (140) may comprises a 2′-OMe RNA (not shown). The gene editor protein (150) may comprise a deaminase that can be used for base editing. FIGS. 1B-1D illustrate other exemplary gene editing systems with guide nucleic acids comprising other exemplary spacer sequences. For example, FIG. 28B illustrates a spacer sequence with motif of (2′-OMe RNA)(2′-OMe RNA)(DNA)(DNA)(RNA)(DNA)(DNA). FIG. 28C illustrates another spacer sequence with another motif of (2′-OMe RNA)(2′-OMe RNA)(DNA)(DNA)(DNA)(DNA)(DNA). FIG. 28D illustrates another spacer sequence with another motif of (2′-OMe RNA)(2′-OMe RNA)(2′-OMe RNA)(DNA)(DNA)(DNA)(DNA)(RNA)(DNA)(DNA)(RNA)(RNA)(DNA)(DNA). Note that the specific phosphorothioate backbone modifications are not shown. Note the drawing is for schematic purpose only.

[0151] The present disclosure further provides a novel gene editing system for base editing with high on-target efficiency and low off-target editing. The novel gene editing system for base editing described herein achieves the benefits by using the novel guide nucleic acid described herein to direct the gene editor protein comprising a deaminase to modify a nucleobase in the target gene.

[0152] The present disclosure further provides a novel gene editing system for editing ANGPTL3 gene with high on-target efficiency and low off-target editing. The novel gene editing system for editing ANGPTL3 gene described herein achieves the benefits by using the novel guide nucleic acid to direct the gene editor protein to affect an alteration to the ANGPTL3 gene.

### CRISPR Cas Systems

[0153] There are several different CRISPR/Cas systems and the nomenclature and classification of these have changed as the systems are further characterized. The CRISPR/Cas system is superior to other methods of genome editing involving endonucleases, meganucleases, zinc finger nucleases, and transcription activator-like effector nucleases (TALENs), which may require de novo protein engineering for every new target locus.

[0154] Based upon the genes encoding the effector module (i.e., the proteins involved in the interference stage), the CRISPR/Cas systems can be placed in either Class 1 or Class 2. Class 1 systems have a multi-subunit crRNA-effector complex, whereas Class 2 systems have a single protein, such as Cas 9, Cpf1, C2c1, C2c2, C2c3, or a crRNA-effector complex. Class 1 systems comprise Type I, Type III and Type IV systems. Class 2 systems comprise Type II and Type V systems (Makarova et al., Nature Review Microbiology 13: 1-15 (2015)).

[0155] Type I systems all have a Cas3 protein with helicase activity and cleavage activity. Type I systems are divided into seven sub-types (I-A to I-F and I-U). Type III systems possess a cas10 gene, which encodes a multidomain protein containing a Palm domain (a variant of the RNA recognition motif (RRM)) that is homologous to the core domain of numerous nucleic acid polymerases and cyclases and that is the largest subunit of type III crRNA-effector complexes. All type III loci also encode the small subunit protein, one Cas5 protein and typically several Cas7 proteins. Type III can be divided into four sub-types, III-A to III-D. Sub-type 111-A has a csm2 gene encoding a small subunit and also has cas1, cas2 and cas6 genes. Sub-type III-B has a cmr5 gene encoding a small subunit and also typically lacks cas1, cas2 and cas6 genes. Sub-type 111-C has a Cas10 protein with an inactive cyclase-like domain and lacks a cas1 and cas2 gene. Sub-type III-D has a Cas10 protein that lacks the HD domain, it lacks a cas1 and cas2 gene and has a cas5-like gene known as csx10. Type IV systems encode a minimal multisubunit crRNA-effector complex comprising a partially degraded large subunit, Csf1, Cas5, Cas7, and in some cases, a putative small subunit. Type IV systems lack cas1 and cas2 genes. Type IV systems do not have sub-types, but there are two distinct variants. One variant has a DinG family helicase, while the other variant lacks a DinG family helicase, but has a gene encoding a small α-helical protein.

[0156] Type II systems have cas1, cas2 and cas9 genes. cas9 encodes a multidomain protein that combines the functions of the crRNA-effector complex with target DNA cleavage. Type II systems also encode a tracrRNA. Type II systems are divided into three sub-types, subtypes II-A, II-B and II-C. Sub-type II-A contains an additional gene, csn2. Sub-type II-B lacks csn2, but has cas4. Sub-type II-C is the most common Type II system found in bacteria and has only three proteins, Cas1, Cas2 and Cas9. Type V systems have a cpf1 gene and cas1 and cas2 genes. The cpf1 gene encodes a protein, Cpf1, that has a RuvC-like nuclease domain that is homologous to the respective domain of Cas9, but lacks the HNH nuclease domain that is present in Cas9 proteins.

[0157] In Class 1 systems, the expression and interference stages involve multisubunit CRISPR RNA (crRNA)-effector complexes. In these systems, pre-crRNA is bound to the multisubunit crRNA-effector complex and processed into a mature crRNA. In Type I and III systems this involves an RNA endonuclease, e.g., Cas6.

[0158] In Class 1 systems the crRNA is associated with the crRNA-effector complex and achieves interference by combining nuclease activity with RNA-binding domains and base pair formation between the crRNA and a target nucleic acid. In Type I systems, the crRNA and target binding of the crRNA-effector complex involves Cas7, Cas5, and Cas8 fused to a small subunit protein. The target nucleic acid cleavage of Type I systems involves the HD nuclease domain, which is either fused to the superfamily 2 helicase Cas3′ or is encoded by a separate gene, cas3″. In Type III systems, the crRNA and target binding of the crRNA-effector complex involves Cas7, Cas5, Cas10 and a small subunit protein. The target nucleic acid cleavage of Type III systems involves the combined action of the Cas7 and Cas10 proteins, with a distinct HD nuclease domain fused to Cas10, which is thought to cleave single-stranded DNA during interferences.

[0159] In Class 2 systems, the expression and interference stages involve a single large protein, e.g., Cas9, Cpf1, C2C1, C2C2, or C2C3. In most Class 2 Type II systems, pre-crRNA is bound to Cas9 and processed into a mature crRNA in a step that involves RNase III and a tracrRNA.

[0160] In Class 2 systems the crRNA is associated with a single protein and achieves interference by combining nuclease activity with RNA-binding domains and base pair formation between the crRNA and a target nucleic acid. In Type II systems, the crRNA and target binding involves Cas9 as does the target nucleic acid cleavage. In Type II systems, the RuvC-like nuclease (RNase H fold) domain and the HNH (McrA-like) nuclease domain of Cas9 each cleave one of the strands of the target nucleic acid. The Cas9 cleavage activity of Type II systems also requires hybridization of crRNA to tracrRNA to form a duplex that facilitates the crRNA and target binding by the Cas9. In Type V systems, the crRNA and target binding involves Cpf1 as does the target nucleic acid cleavage. In Type V systems, the RuvC-like nuclease domain of Cpf1 cleaves both strands of the target nucleic acid in a staggered configuration, producing 5′ overhangs, which is in contrast to the blunt ends generated by Cas9 cleavage. These 5′ overhangs may facilitate insertion of DNA through non-homologous end-joining (NHEJ) methods.

[0161] The Cpf1 cleavage activity of Type V systems also does not require hybridization of crRNA to tracrRNA to form a duplex, rather the crRNA of Type V systems use a single crRNA that has a stem loop structure forming an internal duplex. Cpf1 binds the crRNA in a sequence and structure specific manner, that recognizes the stem loop and sequences adjacent to the stem loop, most notably, the nucleotide 5′ of the spacer sequences that hybridizes to the target nucleic acid. This stem loop structure is typically in the range of 15 to 19 nucleotides in length. Substitutions that disrupt this stem loop duplex abolish cleavage activity, whereas other substitutions that do not disrupt the stem loop duplex do not abolish cleavage activity. In Type V systems, the crRNA forms a stem loop structure at the 5′ end and the sequence at the 3′ end is complementary to a sequence in a target nucleic acid.

[0162] Other proteins associated with Type V crRNA and target binding and cleavage include Class 2 candidate 1 (C2c1) and Class 2 candidate 3 (C2c3). C2c1 and C2c3 proteins are similar in length to Cas9 and Cpf1 proteins, ranging from approximately 1,100 amino acids to approximately 1,500 amino acids. C2c1 and C2c3 proteins also contain RuvC-like nuclease domains and have an architecture similar to Cpf1. C2c1 proteins are similar to Cas9 proteins in requiring a crRNA and a tracrRNA for target binding and cleavage, but have an optimal cleavage temperature of 50° C. C2c1 proteins target an AT-rich PAM, which similar to Cpf1, is 5′ of the target sequence, (Shmakov et al., Molecular Cell 60(3): 385-397 (2015)). Class 2 candidate 2 (C2c2) does not share sequence similarity to other CRISPR effector proteins, and therefore may be in a putative Type VI system. C2c2 proteins have two HEPN domains and are predicted to have RNase activity, and therefore may target and cleave mRNA. C2c2 proteins appear similar to Cpf1 proteins in requiring crRNA for target binding and cleavage, while not requiring tracrRNA. Also like Cpf1, the crRNA for C2c2 proteins forms a stable hairpin, or stem loop structure, that may aid in association with the C2c2 protein.

[0163] The gene editing systems provided herein may comprise Class 1 or Class 2 system components, including ribonucleic acid protein complexes. The Class 2 Cas nuclease families of proteins are enzymes with DNA endonuclease activity, and they can be directed to cleave a desired nucleic acid target by designing an appropriate guide RNA, as described further herein. A Class 2 CRISPR/Cas system component may be from a Type II, Type IIA, Type IIB, Type IIC, Type V, or Type VI system. Class 2 Cas nucleases include, for example, Cas9 (also known as Csn1 or Csx12), Csn2, Cas4, Cas12a (Cpf1), Cas12b (C2c1), Cas12c (C2c3), Cas13a (C2c2), Cas13b, Cas13c, and Cas13d proteins. In some embodiments, the Cas protein is from a Type II CRISPR/Cas system, i.e., a Cas9 protein from a CRISPR/Cas9 system, or a Type V CRISPR/Cas system, e.g., a Cas12a protein. In some embodiments, the Cas protein is from a Class 2 CRISPR/Cas system, i.e., a single-protein Cas nuclease such as a Cas9 protein or a Cas12a protein. Other non-limiting examples of Cas proteins can include Cas1, Cas1B, Cas2, Cas3, Cas4, Cas5, Cas6, Cas7, Cas8, Cas10, Csy1, Csy2, Csy3, Cse1, Cse2, Csc1, Csc2, Csa5, Csn2, Csm2, Csm3, Csm4, Csm5, Csm6, Cmr1, Cmr3, Cmr4, Cmr5, Cmr6, Csb1, Csb2, Csb3, Csx17, Csx14, Csx10, Csx16, CsaX, Csx3, Csx1, Csx1S, Csf1, Csf2, CsO, Csf4, Cpf1, Cas9HiFi, homologues thereof, or modified versions thereof.

### Base Editing Base Editing System

[0164] Class 2 CRISPR/Cas systems, particularly CRISPR/Cas9 systems, have been used for precision genome editing. Through the use of a guide RNA (gRNA) with a sequence homologous to that of a sequence of DNA in the target genome (known as the protospacer) adjacent to a specific protospacer-adjacent motif (PAM) comprising the sequence NGG (N is any standard base) in the DNA, Cas9 can be used to create a double-strand break (DSB) at the targeted sequence. NHEJ at DSBs can be used to create indels and knock out genes at genetic loci; likewise, homology-directed repair (HDR) can be used, with an introduced template DNA, to insert genes or modify the targeted sequence.

[0165] In some aspects, provided herein are base editor systems capable of nucleobase modifications. In some embodiments, the base editor system comprises (i) a guide polynucleotide or a nucleic acid encoding same, and (ii) a base editor fusion protein comprising a programmable DNA binding domain (e.g., Cas9 or dCas9) and a deaminase, or a nucleic acid encoding same. In some embodiments, the base editor system comprises a guide polynucleotide. In some embodiments, the base editor system comprises a nucleic acid encoding a guide polynucleotide. In some embodiments, the base editor system comprises a base editor fusion protein comprising a programmable DNA binding domain and a deaminase. In some embodiments, the base editor system comprises a nucleic acid encoding a base editor fusion protein comprising a programmable DNA binding domain and a deaminase.

[0166] In some embodiments, the guide polynucleotide directs the base editor system to effect a nucleobase alteration in a PCSK9 or ANGPTL3 gene in vivo when administered to a subject.

[0167] In some embodiments, the base alteration occurs in at least 35% of whole liver cells in the subject as measured by next generation sequencing or Sanger sequencing.

[0168] In some embodiments, the base alteration occurs in at least 1%, 2%, 3%, 4%, 5%, 6%, 7%, 8%, 9%, 10%, 15%, 20%, 25%, 30%, 35%, 40%, 45%, 50%, 55%, 60%, 65%, 70%, 75%, 80%, 85%, 90%, 95%, 97%, 98%, 99%, 99.3%, 99.5%, 99.7%, 99.8%, or 99.9% of whole liver cells in the subject as measured by next generation sequencing or Sanger sequencing. In some embodiments, the base alteration occurs in at most 1%, 2%, 3%, 4%, 5%, 6%, 7%, 8%, 9%, 10%, 15%, 20%, 25%, 30%, 35%, 40%, 45%, 50%, 55%, 60%, 65%, 70%, 75%, 80%, 85%, 90%, 95%, 97%, 98%, 99%, 99.3%, 99.5%, 99.7%, 99.8%, or 99.9% of whole liver cells in the subject as measured by next generation sequencing or Sanger sequencing. In some embodiments, the base alteration occurs in 1%-99.9%, 2%-99.9%, 3%-99.9%, 4%-99.9%, 5%-99.9%, 6%-99.9%, 7%-99.9%, 8%-99.9%, 9%-99.9%, 10%-99.9%, 15%-99.9%, 20%-99.9%, 25%-99.9%, 30%-99.9%, 35%-99.9%, 40%-99.9%, 45%-99.9%, 50%-99.9%, 55%-99.9%, 60%-99.9%, 65%-99.9%, 70%-99.9%, 75%-99.9%, 80%-99.9%, 85%-99.9%, 90%-99.9%, or 95-99.9% of whole liver cells in the subject as measured by next generation sequencing or Sanger sequencing. In some embodiments, the base alteration occurs in 1%-99.5%, 1%-99%, 1%-98%, 1%-97%, 1%-96%, 1%-95%, 1%-90%, 1%-85%, 1%-80%, 1%-75%, 1%-70%, 1%-65%, 1%-60%, 1%-55%, 1%-50%, 1%-45%, 1%-40%, 1%-35%, 1%-30%, 1%-25%, 1%-20%, 1%-15%, 1%-10%, 1%-9%, 1%-8%, 1%-7%, 1%-6%, 1%-5%, 1%-4%, 1%-3%, or 1%-2% of whole liver cells in the subject as measured by next generation sequencing or Sanger sequencing. In some embodiments, the base alteration occurs in 1%-90%, 5%-85%, 10%-80%, 15%-75%, 20%-70%, 25%-65%, 30%-60%, 35%-55%, or 40%-50% of whole liver cells in the subject as measured by next generation sequencing or Sanger sequencing. In some embodiments, the base alteration occurs in 100% of whole liver cells in the subject as measured by next generation sequencing or Sanger sequencing.

[0169] In some embodiments, the base alteration occurs in hepatocytes in the subject. In some embodiments, the base alteration occurs in at least 30% of hepatocytes in the subject as measured by next generation sequencing or Sanger sequencing. In some embodiments, the base alteration occurs in hepatocytes in the subject. In some embodiments, the base alteration occurs in at least % of hepatocytes in the subject as measured by next generation sequencing or Sanger sequencing. In some embodiments, the base alteration occurs in at least 1%, 2%, 3%, 4%, 5%, 6%, 7%, 8%, 9%, 10, 1%, 20%, 25%, 30%, 35%, 40%, 45%, 50%, 55%, 60%, 65%, 70%, 75%, 80%, 85%, 90%, 95%, 97%, 98%, 99%, 99.3%, 99.5%, 99.7%, 99.8%, or 99.9% of hepatocytes in the subject as measured by next generation sequencing or Sanger sequencing. In some embodiments, the base alteration occurs in at most 1%, 2%, 3%, 4%, 5%, 10%, 15%, 20%, 25%, 30%, 35%, 40%, 45%, 50%, 55%, 60%, 65%, 70%, 75%, 80%, 85%, 90%, 95%, 97%, 98%, 99%, 99.3%, 99.5%, 99.7%, 99.8%, or 99.9% of hepatocytes in the subject as measured by next generation sequencing or Sanger sequencing. In some embodiments, the base alteration occurs in 1%-99.9%, 2%-99.9%, 3%-99.9%, 4%-99.9%, 5%-99.9%, 6%-99.9%, 7%-99.9%, 8%-99.9%, 9%-99.9%, 10%-99.9%, 15%-99.9%, 20%-99.9%, 25%-99.9%, 30%-99.9%, 35%-99.9%, 40%-99.9%, 45%-99.9%, 50%-99.9%, 55%-99.9%, 60%-99.9%, 65%-99.9%, 70%-99.9%, 75%-99.9%, 80%-99.9%, 85%-99.9%, 90%-99.9%, or 95-99.9% of hepatocytes in the subject as measured by next generation sequencing or Sanger sequencing. In some embodiments, the base alteration occurs in 1%-99.5%, 1%-99%, 1%-98%, 1%-97%, 1%-96%, 1%-95%, 1%-90%, 1%-85%, 1%-80%, 1%-75%, 1%-70%, 1%-65%, 1%-60%, 1%-55%, 1%-50%, 1%-45%, 1%-40%, 1%-35%, 1%-30%, 1%-25%, 1%-20%, 1%-15%, 1%-10%, 1%-9%, 1%-8%, 1%-7%, 1%-6%, 1%-5%, 1%-4%, 1%-3%, or 1%-2% hepatocytes in the subject as measured by next generation sequencing or Sanger sequencing. In some embodiments, the base alteration occurs in 1%-90%, 5%-85%, 10%-80%, 15%-75%, 20%-70%, 25%-65%, 30%-60%, 35%-55%, or 40%-50% of hepatocytes in the subject as measured by next generation sequencing or Sanger sequencing. In some embodiments, the base alteration occurs in 100% of hepatocytes in the subject as measured by next generation sequencing or Sanger sequencing.

[0170] In some embodiments, the base alteration occurred in whole liver cells in the subject is measured by next generation sequencing. In some embodiments, the base alteration occurred in whole liver cells in the subject is measured by Sanger sequencing. In some embodiments, the base alteration occurred in hepatocytes in the subject is measured by next generation sequencing. In some embodiments, the base alteration occurred in hepatocytes in the subject is measured by Sanger sequencing.

[0171] In some embodiments, the nucleobase alteration results in a reduction of at least 35% in blood PCSK9 protein level in the subject as compared to prior to the administration as measured by ELISA, Western blots, or LC-MS/MS. In some embodiments, the nucleobase alteration results in a reduction of at least 35% in blood ANGPTL3 protein level in the subject as compared to prior to the administration as measured by ELISA, Western blots, or LC-MS/MS.

[0172] In some embodiments, the nucleobase alteration results in a reduction of at least 30%, 35%, 40%, 45%, 50%, 55%, 60%, 65%, 70%, 75%, 80%, 85%, 90%, 95%, 97%, 98%, or 99% in blood PCSK9 protein level in the subject as compared to prior to the administration as measured by ELISA, Western blots, or LC-MS/MS. In some embodiments, the nucleobase alteration results in a reduction of at least 1%, 2%, 3%, 4%, 5%, 6%, 7%, 8%, 9%, 10%, 15%, 20%, 25%, 30%, 31%, 32%, 33%, 34%, 35%, 36%, 37%, 38%, 39%, 40%, 45%, 50%, 55%, 60%, 65%, 70%, 71%, 72%, 73%, 74%, 75%, 76%, 77%, 78%, 79%, 80%, 85%, 90%, 95%, 97%, 98%, 90%, 95%, 97%, 98%, 99%, 99.3%, 99.5%, 99.7%, 99.8%, or 99.9% in blood PCSK9 protein level in the subject as compared to prior to the administration as measured by ELISA, Western blots, or LC-MS/MS. In some embodiments, the nucleobase alteration results in a reduction of at most 1%, 2%, 3%, 4%, 5%, 6%, 7%, 8%, 9%, 10%, 15%, 20%, 25%, 30%, 31%, 32%, 33%, 34%, 35%, 36%, 37%, 38%, 39%, 40%, 45%, 50%, 55%, 60%, 65%, 70%, 71%, 72%, 73%, 74%, 75%, 76%, 77%, 78%, 79%, 80%, 85%, 90%, 95%, 97%, 98%, 90%, 95%, 97%, 98%, 99%, 99.3%, 99.5%, 99.7%, 99.8%, or 99.9% in blood PCSK9 protein level in the subject as compared to prior to the administration as measured by ELISA, Western blots, or LC-MS/MS. In some embodiments, the nucleobase alteration results in a reduction of 1%-99.9%, 2%-99.9%, 3%-99.9%, 4%-99.9%, 5%-99.9%, 6%-99.9%, 7%-99.9%, 8%-99.9%, 9%-99.9%, 10%-99.9%, 15%-99.9%, 20%-99.9%, 25%-99.9%, 30%-99.9%, 31%-99.9%, 32%-99.9%, 33%-99.9%, 34%-99.9%, 35%-99.9%, 36%-99.9%, 37%-99.9%, 38%-99.9%, 39%-99.9%, 40%-99.9%, 45%-99.9%, 50%-99.9%, 55%-99.9%, 60%-99.9%, 65%-99.9%, 70%-99.9%, 75%-99.9%, 80%-99.9%, 85%-99.9%, 90%-99.9%, or 95-99.9% in blood PCSK9 protein level in the subject as compared to prior to the administration as measured by ELISA, Western blots, or LC-MS/MS. In some embodiments, the nucleobase alteration results in a reduction of 1%-99.5%, 1%-99%, 1%-98%, 1%-97%, 1%-96%, 1%-95%, 1%-90%, 1%-85%, 1%-80%, 1%-79%, 1%-78%, 1%-77%, 1%-76%, 1%-75%, 1%-74%, 1%-73%, 1%-72%, 1%-71%, 1%-70%, 1%-65%, 1%-60%, 1%-55%, 1%-50%, 1%-45%, 1%-40%, 1%-39%, 1%-38%, 1%-37%, 1%-36%, 1%-35%, 1%-34%, 1%-33%, 1%-32%, 1%-31%, 1%-30%, 1%-25%, 1%-20%, 1%-15%, 1%-10%, 1%-9%, 1%-8%, 1%-7%, 1%-6%, 1%-5%, 1%-4%, 1%-3%, or 1%-2% in blood PCSK9 protein level in the subject as compared to prior to the administration as measured by ELISA, Western blots, or LC-MS/MS. In some embodiments, the nucleobase alteration results in a reduction of 1%-99.9%, 5%-99.5%, 10%-99%, 15%-97%, 20%-95%, 25%-90%, 30%-85%, 31%-80%, 32%-79%, 33%-78%, 34%-77%, 35%-76%, 36%-76%, 37%-75%, 38%-74%, 39%-73%, 40%-72%, 45%-71%, 50%-70%, or 55%-65% in blood PCSK9 protein level in the subject as compared to prior to the administration as measured by ELISA, Western blots, or LC-MS/MS. In some embodiments, the nucleobase alteration results in a reduction of 100% in blood PCSK9 protein level in the subject as compared to prior to the administration as measured by ELISA, Western blots, or LC-MS/MS.

[0173] In some embodiments, the nucleobase alteration results in at least 1%, 2%, 3%, 4%, 5%, 6%, 7%, 8%, 9%, 10%, 11%, 12%, 13%, 14%, 15%, 20%, 25%, 30%, 35%, 40%, 50%, 75%, 90%, 100%, 110%, 120%, 130%, 140%, 150%, 160%, 170%, 180%, 190%, 200%, 210%, 220%, 230%, 240%, 250%, 260%, 270%, 280%, 290%, 300%, 400% 500%, 600%, 700%, 800%, 900%, 1000% less blood PCSK9 protein level in the subject as compared to prior to the administration as measured by ELISA, Western blots, or LC-MS/MS. In some embodiments, the nucleobase alteration results in at least 1.1-fold, 1.2-fold, 1.3-fold, 1.4-fold, 1.5-fold, 1.6-fold, 1.7-fold, 1.8-fold, 1.9-fold, 2-fold, 2.5-fold, 3-fold, 3.5-fold, 4-fold, 4.5-fold, 5-fold, 6-fold, 7-fold, 8-fold, 9-fold, 10-fold, or more than 10-fold less blood PCSK9 protein level in the subject as compared to prior to the administration as measured by ELISA, Western blots, or LC-MS/MS.

[0174] In some embodiments, the reduction of blood PCSK9 protein level or the blood PCSK9 protein level in the subject as compared to prior to the administration is measured by ELISA (enzyme-linked immunosorbent assay). In some embodiments, the reduction of blood PCSK9 protein level or the blood PCSK9 protein level in the subject as compared to prior to the administration is measured by Western blot analysis. In some embodiments, the reduction of blood PCSK9 protein level or the blood PCSK9 protein level in the subject as compared to prior to the administration is measured by LC-MS/MS (liquid chromatography-tandem mass spectrometry).

[0175] In some embodiments, the nucleobase alteration results in a reduction of at least 30%, 35%, 40%, 45%, 50%, 55%, 60%, 65%, 70%, 75%, 80%, 85%, 90%, 95%, 97%, 98%, or 99% in blood ANGPTL3 protein level in the subject as compared to prior to the administration as measured by ELISA, Western blots, or LC-MS/MS. In some embodiments, the nucleobase alteration results in a reduction of at least 1%, 2%, 3%, 4%, 5%, 6%, 7%, 8%, 9%, 10%, 15%, 20%, 25%, 30%, 31%, 32%, 33%, 34%, 35%, 36%, 37%, 38%, 39%, 40%, 45%, 50%, 55%, 60%, 65%, 70%, 71%, 72%, 73%, 74%, 75%, 76%, 77%, 78%, 79%, 80%, 85%, 90%, 95%, 97%, 98%, 90%, 95%, 97%, 98%, 99%, 99.3%, 99.5%, 99.7%, 99.8%, or 99.9% in blood ANGPTL3 protein level in the subject as compared to prior to the administration as measured by ELISA, Western blots, or LC-MS/MS. In some embodiments, the nucleobase alteration results in a reduction of at most 1%, 2%, 3%, 4%, 5%, 6%, 7%, 8%, 9%, 10%, 15%, 20%, 25%, 30%, 31%, 32%, 33%, 34%, 35%, 36%, 37%, 38%, 39%, 40%, 45%, 50%, 55%, 60%, 65%, 70%, 71%, 72%, 73%, 74%, 75%, 76%, 77%, 78%, 79%, 80%, 85%, 90%, 95%, 97%, 98%, 90%, 95%, 97%, 98%, 99%, 99.3%, 99.5%, 99.7%, 99.8%, or 99.9% in blood ANGPTL3 protein level in the subject as compared to prior to the administration as measured by ELISA, Western blots, or LC-MS/MS. In some embodiments, the nucleobase alteration results in a reduction of 1%-99.9%, 2%-99.9%, 3%-99.9%, 4%-99.9%, 5%-99.9%, 6%-99.9%, 7%-99.9%, 8%-99.9%, 9%-99.9%, 10%-99.9%, 15%-99.9%, 20%-99.9%, 25%-99.9%, 30%-99.9%, 31%-99.9%, 32%-99.9%, 33%-99.9%, 34%-99.9%, 35%-99.9%, 36%-99.9%, 37%-99.9%, 38%-99.9%, 39%-99.9%, 40%-99.9%, 45%-99.9%, 50%-99.9%, 55%-99.9%, 60%-99.9%, 65%-99.9%, 70%-99.9%, 75%-99.9%, 80%-99.9%, 85%-99.9%, 90%-99.9%, or 95-99.9% in blood ANGPTL3 protein level in the subject as compared to prior to the administration as measured by ELISA, Western blots, or LC-MS/MS. In some embodiments, the nucleobase alteration results in a reduction of 1%-99.5%, 1%-99%, 1%-98%, 1%-97%, 1%-96%, 1%-95%, 1%-90%, 1%-85%, 1%-80%, 1%-79%, 1%-78%, 1%-77%, 1%-76%, 1%-75%, 1%-74%, 1%-73%, 1%-72%, 1%-71%, 1%-70%, 1%-65%, 1%-60%, 1%-55%, 1%-50%, 1%-45%, 1%-40%, 1%-39%, 1%-38%, 1%-37%, 1%-36%, 1%-35%, 1%-34%, 1%-33%, 1%-32%, 1%-31%, 1%-30%, 1%-25%, 1%-20%, 1%-15%, 1%-10%, 1%-9%, 1%-8%, 1%-7%, 1%-6%, 1%-5%, 1%-4%, 1%-3%, or 1%-2% in blood ANGPTL3 protein level in the subject as compared to prior to the administration as measured by ELISA, Western blots, or LC-MS/MS. In some embodiments, the nucleobase alteration results in a reduction of 1%-99.9%, 5%-99.5%, 10%-99%, 15%-97%, 20%-95%, 25%-90%, 30%-85%, 31%-80%, 32%-79%, 33%-78%, 34%-77%, 35%-76%, 36%-76%, 37%-75%, 38%-74%, 39%-73%, 40%-72%, 45%-71%, 50%-70%, or 55%-65% in blood ANGPTL3 protein level in the subject as compared to prior to the administration as measured by ELISA, Western blots, or LC-MS/MS. In some embodiments, the nucleobase alteration results in a reduction of 100% in blood ANGPTL3 protein level in the subject as compared to prior to the administration as measured by ELISA, Western blots, or LC-MS/MS.

[0176] In some embodiments, the nucleobase alteration results in at least 1%, 2%, 3%, 4%, 5%, 6%, 7%, 8%, 9%, 10%, 11%, 12%, 13%, 14%, 15%, 20%, 25%, 30%, 35%, 40%, 50%, 75%, 90%, 100%, 110%, 120%, 130%, 140%, 150%, 160%, 170%, 180%, 190%, 200%, 210%, 220%, 230%, 240%, 250%, 260%, 270%, 280%, 290%, 300%, 400% 500%, 600%, 700%, 800%, 900%, 1000% less blood ANGPTL3 protein level in the subject as compared to prior to the administration as measured by ELISA, Western blots, or LC-MS/MS. In some embodiments, the nucleobase alteration results in at least 1.1-fold, 1.2-fold, 1.3-fold, 1.4-fold, 1.5-fold, 1.6-fold, 1.7-fold, 1.8-fold, 1.9-fold, 2-fold, 2.5-fold, 3-fold, 3.5-fold, 4-fold, 4.5-fold, 5-fold, 6-fold, 7-fold, 8-fold, 9-fold, 10-fold, or more than 10-fold less blood ANGPTL3 protein level in the subject as compared to prior to the administration as measured by ELISA, Western blots, or LC-MS/MS.

[0177] In some embodiments, the reduction of blood ANGPTL3 protein level or the blood ANGPTL3 protein level in the subject as compared to prior to the administration is measured by ELISA (enzyme-linked immunosorbent assay). In some embodiments, the reduction of blood ANGPTL3 protein level or the blood ANGPTL3 protein level in the subject as compared to prior to the administration is measured by Western blot analysis. In some embodiments, the reduction of blood ANGPTL3 protein level or the blood ANGPTL3 protein level in the subject as compared to prior to the administration is measured by LC-MS/MS (liquid chromatography-tandem mass spectrometry).

[0178] In some embodiments, the nucleobase alteration results in a reduction of at least 35% in blood or low-density lipoprotein cholesterol (LDL-C) levels in the subject as compared to prior to the administration. In some embodiments, the nucleobase alteration results in a reduction of at least 35%, 40%, 45%, 46%, 47%, 48%, 49%, 50%, 51%, 52%, 53%, 54%, 55%, 56%, 57%, 58%, 59%, 60%, 61%, 62%, 63%, 64%, 65%, 70%, 75%, 80%, 85%, 90%, 95%, 97%, 98%, or 99% in blood low-density lipoprotein cholesterol (LDL-C) level in the subject as compared to prior to the administration. In some embodiments, the nucleobase alteration results in a reduction of at least 1%, 2%, 3%, 4%, 5%, 6%, 7%, 8%, 9%, 10%, 15%, 20%, 25%, 30%, 35%, 40%, 45%, 46%, 47%, 48%, 49%, 50%, 51%, 52%, 53%, 54%, 55%, 56%, 57%, 58%, 59%, 60%, 61%, 62%, 63%, 64%, 65%, 70%, 75%, 80%, 85%, 90%, 95%, 97%, 98%, 99%, 99.3%, 99.5%, 99.7%, 99.8%, or 99.9% in blood low-density lipoprotein cholesterol (LDL-C) level in the subject as compared to prior to the administration. In some embodiments, the nucleobase alteration results in a reduction of at most 1%, 2%, 3%, 4%, 5%, 6%, 7%, 8%, 9%, 10%, 15%, 20%, 25%, 30%, 35%, 40%, 45%, 50%, 55%, 60%, 65%, 70%, 75%, 80%, 85%, 90%, 95%, 97%, 98%, 99%, 99.3%, 99.5%, 99.7%, 99.8%, or 99.9% in blood low-density lipoprotein cholesterol (LDL-C) level in the subject as compared to prior to the administration. In some embodiments, the nucleobase alteration results in a reduction of 1%-99.9%, 2%-99.9%, 3%-99.9%, 4%-99.9%, 5%-99.9%, 6%-99.9%, 7%-99.9%, 8%-99.9%, 9%-99.9%, 10%-99.9%, 15%-99.9%, 20%-99.9%, 25%-99.9%, 30%-99.9%, 35%-99.9%, 40%-99.9%, 45%-99.9%, 50%-99.9%, 55%-99.9%, 60%-99.9%, 65%-99.9%, 70%-99.9%, 75%-99.9%, 80%-99.9%, 85%-99.9%, 90%-99.9%, or 95-99.9% in blood low-density lipoprotein cholesterol (LDL-C) level in the subject as compared to prior to the administration. In some embodiments, the nucleobase alteration results in a reduction of 1%-99.5%, 1%-99%, 1%-98%, 1%-97%, 1%-96%, 1%-95%, 1%-90%, 1%-85%, 1%-80%, 1%-75%, 1%-70%, 1%-65%, 1%-60%, 1%-55%, 1%-50%, 1%-45%, 1%-40%, 1%-35%, 1%-30%, 1%-25%, 1%-20%, 1%-15%, 1%-10%, 1%-9%, 1%-8%, 1%-7%, 1%-6%, 1%-5%, 1%-4%, 1%-3%, or 1%-2% in blood low-density lipoprotein cholesterol (LDL-C) level in the subject as compared to prior to the administration. In some embodiments, the nucleobase alteration results in a reduction of 1%-99.9%, 5%-99.5%, 10%-99%, 15%-97%, 20%-95%, 25%-90%, 30%-85%, 35%-80%, 40%-75%, 45%-70%, 50%-65%, or 55%-60% in blood low-density lipoprotein cholesterol (LDL-C) level in the subject as compared to prior to the administration. In some embodiments, the nucleobase alteration results in a reduction of 100% in blood low-density lipoprotein cholesterol (LDL-C) level in the subject as compared to prior to the administration. In some embodiments, the nucleobase alteration results in at least 1%, 2%, 3%, 4%, 5%, 6%, 7%, 8%, 9%, 10%, 11%, 12%, 13%, 14%, 15%, 20%, 25%, 30%, 35%, 40%, 50%, 75%, 90%, 100%, 110%, 120%, 130%, 140%, 150%, 160%, 170%, 180%, 190%, 200%, 210%, 220%, 230%, 240%, 250%, 260%, 270%, 280%, 290%, 300%, 400% 500%, 600%, 700%, 800%, 900%, 1000% less blood low-density lipoprotein cholesterol (LDL-C) level in the subject as compared to prior to the administration. In some embodiments, the nucleobase alteration results in at least 1.1-fold, 1.2-fold, 1.3-fold, 1.4-fold, 1.5-fold, 1.6-fold, 1.7-fold, 1.8-fold, 1.9-fold, 2-fold, 2.5-fold, 3-fold, 3.5-fold, 4-fold, 4.5-fold, 5-fold, 6-fold, 7-fold, 8-fold, 9-fold, 10-fold, or more than 10-fold less blood low-density lipoprotein cholesterol (LDL-C) level in the subject as compared to prior to the administration.

[0179] In some embodiments, the nucleobase alteration results in a reduction of at least 35% in blood triglyceride levels in the subject as compared to prior to the administration. In some embodiments, the nucleobase alteration results in a reduction of at least 30%, 35%, 40%, 45%, 46%, 47%, 48%, 49%, 50%, 51%, 52%, 53%, 54%, 55%, 56%, 57%, 58%, 59%, 60%, 61%, 62%, 63%, 64%, 65%, 70%, 75%, 80%, 85%, 90%, 95%, 97%, 98%, or 99% in blood triglyceride level in the subject as compared to prior to the administration. In some embodiments, the nucleobase alteration results in a reduction of at least 1%, 2%, 3%, 4%, 5%, 6%, 7%, 8%, 9%, 10%, 15%, 20%, 25%, 30%, 35%, 40%, 45%, 46%, 47%, 48%, 49%, 50%, 51%, 52%, 53%, 54%, 55%, 56%, 57%, 58%, 59%, 60%, 61%, 62%, 63%, 64%, 65%, 70%, 75%, 80%, 85%, 90%, 95%, 97%, 98%, 99%, 99.3%, 99.5%, 99.7%, 99.8%, or 99.9% in blood triglyceride level in the subject as compared to prior to the administration. In some embodiments, the nucleobase alteration results in a reduction of at most 1%, 2%, 3%, 4%, 5%, 6%, 7%, 8%, 9%, 10%, 15%, 20%, 25%, 30%, 35%, 40%, 45%, 50%, 55%, 60%, 65%, 70%, 75%, 80%, 85%, 90%, 95%, 97%, 98%, 99%, 99.3%, 99.5%, 99.7%, 99.8%, or 99.9% in blood triglyceride level in the subject as compared to prior to the administration. In some embodiments, the nucleobase alteration results in a reduction of 1%-99.9%, 2%-99.9%, 3%-99.9%, 4%-99.9%, 5%-99.9%, 6%-99.9%, 7%-99.9%, 8%-99.9%, 9%-99.9%, 10%-99.9%, 15%-99.9%, 20%-99.9%, 25%-99.9%, 30%-99.9%, 35%-99.9%, 40%-99.9%, 45%-99.9%, 50%-99.9%, 55%-99.9%, 60%-99.9%, 65%-99.9%, 70%-99.9%, 75%-99.9%, 80%-99.9%, 85%-99.9%, 90%-99.9%, or 95-99.9% in blood triglyceride level in the subject as compared to prior to the administration. In some embodiments, the nucleobase alteration results in a reduction of 1%-99.5%, 1%-99%, 1%-98%, 1%-97%, 1%-96%, 1%-95%, 1%-90%, 1%-85%, 1%-80%, 1%-75%, 1%-70%, 1%-65%, 1%-60%, 1%-55%, 1%-50%, 1%-45%, 1%-40%, 1%-35%, 1%-30%, 1%-25%, 1%-20%, 1%-15%, 1%-10%, 1%-9%, 1%-8%, 1%-7%, 1%-6%, 1%-5%, 1%-4%, 1%-3%, or 1%-2% in blood triglyceride level in the subject as compared to prior to the administration. In some embodiments, the nucleobase alteration results in a reduction of 1%-99.9%, 5%-99.5%, 10%-99%, 15%-97%, 20%-95%, 25%-90%, 30%-85%, 35%-80%, 40%-75%, 45%-70%, 50%-65%, or 55%-60% in blood triglyceride level in the subject as compared to prior to the administration. In some embodiments, the nucleobase alteration results in a reduction of 100% in blood triglyceride level in the subject as compared to prior to the administration. In some embodiments, the nucleobase alteration results in at least 1%, 2%, 3%, 4%, 5%, 6%, 7%, 8%, 9%, 10%, 11%, 12%, 13%, 14%, 15%, 20%, 25%, 30%, 35%, 40%, 50%, 75%, 90%, 100%, 110%, 120%, 130%, 140%, 150%, 160%, 170%, 180%, 190%, 200%, 210%, 220%, 230%, 240%, 250%, 260%, 270%, 280%, 290%, 300%, 400% 500%, 600%, 700%, 800%, 900%, 1000% less blood triglyceride level in the subject as compared to prior to the administration. In some embodiments, the nucleobase alteration results in at least 1.1-fold, 1.2-fold, 1.3-fold, 1.4-fold, 1.5-fold, 1.6-fold, 1.7-fold, 1.8-fold, 1.9-fold, 2-fold, 2.5-fold, 3-fold, 3.5-fold, 4-fold, 4.5-fold, 5-fold, 6-fold, 7-fold, 8-fold, 9-fold, 10-fold, or more than 10-fold less blood triglyceride level in the subject as compared to prior to the administration.

[0180] In some embodiments, the blood triglyceride level or the reduction of blood triglyceride level in the subject as compared to prior to the administration is measured by any standard technique. In some embodiments, the blood low-density lipoprotein cholesterol (LDL-C) level or the reduction of blood low-density lipoprotein cholesterol (LDL-C) level in the subject as compared to prior to the administration is measured by any standard technique. For example, a clinical analyzer instrument may be used to measure a ‘lipid panel’ in serum samples which entails the direct measurement of cholesterol (total C), triglycerides (TG) and high-density lipoprotein cholesterol (HDL-C) enzymatically. Reagent kits specific for each analyte contain buffers, calibrators, blanks and controls. As used in the present disclosure, cholesterol, triglycerides and HDL-C may be quantified using absorbance measurements of specific enzymatic reaction products. LDL-C may be determined indirectly. In some instances, most of circulating cholesterol can be found in three major lipoprotein fractions: very low-density lipoproteins (VLDL), LDL and HDL. In some embodiments, total circulating cholesterol may be estimated with the formula [Total C]=[VLDL-C]+[LDL-C]+[HDL-C]. Thus the LDL-C can be calculated from measured values of total cholesterol, triglycerides and HDL-C according to the relationship: [LDL-C]=[total C]−[HDL-C]−[TG]/5, where [TG]/5 is an estimate of VLDL-cholesterol. A reagent kit specific for triglycerides containing buffers, calibrators, blanks and controls may be used. As used herein, serum samples from the study may be analyzed and triglycerides may be measured using a series of coupled enzymatic reactions. In some embodiments, H₂O₂ may be used to quantify the analyte. as the end product of the last one and its absorbance at 500 nm, and the color intensity is proportional to triglyceride concentrations.

[0181] In some embodiments, the guide polynucleotide is a guide RNA, wherein the guide RNA comprises a spacer sequence that binds to the complementary strand of a protospacer sequence of the PCSK9 gene with 0, 1, or 2 mismatches. In some embodiments, the guide RNA comprises a spacer sequence that binds to the complementary strand of a protospacer sequence of the PCSK9 gene with no mismatches. In some embodiments, the guide RNA comprises a spacer sequence that binds to the complementary strand of a protospacer sequence of the PCSK9 gene with 1 mismatch. In some embodiments, the guide RNA comprises a spacer sequence that binds to the complementary strand of a protospacer sequence of the PCSK9 gene with 2 mismatches. In some embodiments, the guide RNA comprises a spacer sequence that binds to the complementary strand of a protospacer sequence of the PCSK9 gene with 3 mismatches. In some embodiments, the guide RNA comprises a spacer sequence that binds to the complementary strand of a protospacer sequence of the PCSK9 gene with 4 mismatches. In some embodiments, the guide RNA comprises a spacer sequence that binds to the complementary strand of a protospacer sequence of the PCSK9 gene with 5 mismatches.

[0182] In some embodiments, the guide polynucleotide is a guide RNA, wherein the guide RNA comprises a spacer sequence that binds to the complementary strand of a protospacer sequence of the ANGPTL3 gene with 0, 1, or 2 mismatches. In some embodiments, the guide RNA comprises a spacer sequence that binds to the complementary strand of a protospacer sequence of the ANGPTL3 gene with no mismatches. In some embodiments, the guide RNA comprises a spacer sequence that binds to the complementary strand of a protospacer sequence of the ANGPTL3 gene with 1 mismatch. In some embodiments, the guide RNA comprises a spacer sequence that binds to the complementary strand of a protospacer sequence of the ANGPTL3 gene with 2 mismatches. In some embodiments, the guide RNA comprises a spacer sequence that binds to the complementary strand of a protospacer sequence of the ANGPTL3 gene with 3 mismatches. In some embodiments, the guide RNA comprises a spacer sequence that binds to the complementary strand of a protospacer sequence of the ANGPTL3 gene with 4 mismatches. In some embodiments, the guide RNA comprises a spacer sequence that binds to the complementary strand of a protospacer sequence of the ANGPTL3 gene with 5 mismatches.

[0183] In some embodiments, the nucleobase alteration is outside of the protospacer sequence in less than 1% of whole liver cells in the subject as measured by net nucleobase editing. In some embodiments, the nucleobase alteration is outside of the protospacer sequence in less than 1% of hepatocytes in the subject as measured by net nucleobase editing. In some embodiments, the nucleobase alteration is only within the protospacer sequence as measured by net nucleobase editing.

[0184] In some embodiments, the nucleobase alteration is outside of the protospacer sequence in less than 0.01%. 0.02%, 0.03% 0.04%, 0.05%, 0.06%, 0.07%, 0.08%, 0.09%, 0.1%, 0.2%, 0.3%, 0.4%, 0.5%, 0.6%, 0.7%, 0.8%, 0.9%, 1.0%, 2.0%, 3.0% 4.0%, 5.0%, 6.0%, 7.0%, 8.0%, 9.0%, 10%, 15%, 20%, 25%, 30%, 35%, 40%, 45%, 50%, 55%, 60%, 65%, 70%, 65%, 80%, 85%, 90% of whole liver cells in the subject as measured by net nucleobase editing. In some embodiments, the nucleobase alteration is outside of the protospacer sequence in less than 0.01%. 0.02%, 0.03% 0.04%, 0.05%, 0.06%, 0.07%, 0.08%, 0.09%, 0.1%, 0.2%, 0.3%, 0.4%, 0.5%, 0.6%, 0.7%, 0.8%, 0.9%, 1.0%, 2.0%, 3.0% 4.0%, 5.0%, 6.0%, 7.0%, 8.0%, 9.0%, 10%, 15%, 20%, 25%, 30%, 35%, 40%, 45%, 50%, 55%, 60%, 65%, 70%, 65%, 80%, 85%, 90% of hepatocytes in the subject as measured by net nucleobase editing. In some embodiments, the nucleobase alteration is outside of the protospacer sequence in less than 0.01%. 0.02%, 0.03% 0.04%, 0.05%, 0.06%, 0.07%, 0.08%, 0.09%, 0.1%, 0.2%, 0.3%, 0.4%, 0.5%, 0.6%, 0.7%, 0.8%, 0.9%, 1.0%, 2.0%, 3.0% 4.0%, 5.0%, 6.0%, 7.0%, 8.0%, 9.0%, 10, 1%, 20%, 25%, 30%, 35%, 40%, 45%, 50%, 55%, 60%, 65%, 70%, 65%, 80%, 85%, 90% of cells in the subject as measured by net nucleobase editing.

[0185] In some embodiments, the deaminase is an adenine deaminase. In some embodiments, the nucleobase alteration is a A●T to G●C alteration. In some embodiments, the deaminase is an adenine deaminase and the nucleobase alteration is a A●T to G●C alteration. In some embodiments, the programmable DNA binding domain comprises a nuclease inactive Cas9 or a Cas9 nickase. In some embodiments, the programmable DNA binding domain comprises a Cas9.

[0186] In some embodiments, the nucleobase alteration is at a splice site of the PCSK9 gene. In some embodiments, the nucleobase alteration is at a splice donor site of the PCSK9 gene. In some embodiments, the splice donor site is at 5′ end of PCSK9 intron 1 as referenced in SEQ ID NO: 5. In some embodiments, the nucleobase alteration is at a splice acceptor site of the PCSK9 gene. In some embodiments, the nucleobase alteration results in a frame shift, a premature stop codon, a insertion or deletion in a transcript encoded by the PCSK9 gene. In some embodiments, the nucleobase alteration results in an aberrant transcript encoded by the PCSK9 gene. In some embodiments, the guide polynucleotide is a guide RNA. In some embodiments, the guide RNA is chemically modified. In some embodiments, the guide RNA comprises a tracrRNA sequence. In some embodiments, the guide RNA comprises a chemical modification. Exemplary guide RNA comprising a chemical modification can be found in PCT Application Publication No. WO2021/207712, which is hereby incorporated by reference in its entirety.

[0187] In some embodiments, the nucleobase alteration is at a splice site of the ANGPTL3 gene. In some embodiments, the nucleobase alteration is at a splice donor site of the ANGPTL3 gene. In some embodiments, the splice donor site is at 5′ end of ANGPTL3 intron 6 as referenced in SEQ ID NO: 1. In some embodiments, the nucleobase alteration is at a splice acceptor site of the ANGPTL3 gene. In some embodiments, the nucleobase alteration results in a frame shift, a premature stop codon, an insertion or deletion in a transcript encoded by the ANGPTL3 gene. In some embodiments, the nucleobase alteration results in an aberrant transcript encoded by the ANGPTL3 gene. In some embodiments, the guide polynucleotide is a guide RNA. In some embodiments, the guide RNA is chemically modified. In some embodiments, the guide RNA comprises a tracrRNA sequence. In some embodiments, the guide RNA comprises a chemical modification. Exemplary guide RNA comprising a chemical modification can be found in PCT Application Publication No. WO2021/207712, which is hereby incorporated by reference in its entirety.

[0188] In some embodiments, the guide RNA comprises a guide RNA sequence. Exemplary additional guide RNA sequence can be found in PCT Application Publication No. WO2021/207712, which is hereby incorporated by reference in its entirety.

[0189] In some embodiments, the protospacer sequence comprises a protospacer sequence. In some embodiments, the protospacer comprises the sequence 5′-CCCGCACCTTGGCGCAGCGG-3′ (SEQ ID NO: 731), AAGATACCTGAATAACTCTC-3′ (SEQ ID NO: 732), and 5′-AAGATACCTGAATAACCCTC-3′ (SEQ ID NO: 733).

[0190] In some embodiments, the base editor fusion protein comprises the sequence of SEQ ID NO: 734. In some embodiments, the adenosine deaminase comprises an amino acid sequence that is at least 60%, at least 65%, at least 70%, at least 75%, at least 80%, at least 85%, at least 90%, at least 95%, at least 96%, at least 97%, at least 98%, at least 99%, or at least 99.5% identical to the amino acid sequence set forth in SEQ ID NO: 734 or to any of the adenosine deaminases provided herein. It should be appreciated that adenosine deaminases provided herein may include one or more mutations (e.g., any of the mutations provided herein). The disclosure provides any deaminase domains with a certain percent identity plus any of the mutations or combinations thereof described herein. In some embodiments, the adenosine deaminase comprises an amino acid sequence that has 1, 2, 3, 4, 5, 6, 7, 8, 9, 10, 11, 12, 13, 14, 15, 16, 17, 18, 19, 20, 21, 22, 21, 24, 25, 26, 27, 28, 29, 30, 31, 32, 33, 34, 35, 36, 37, 38, 39, 40, 41, 42, 43, 44, 45, 46, 47, 48, 49, 50, or more mutations compared to the amino acid sequence set forth in SEQ ID NO: 734 or any of the adenosine deaminases provided herein. In some embodiments, the adenosine deaminase comprises an amino acid sequence that has at least 5, at least 10, at least 15, at least 20, at least 25, at least 30, at least 35, at least 40, at least 45, at least 50, at least 60, at least 70, at least 80, at least 90, at least 100, at least 110, at least 120, at least 130, at least 140, at least 150, at least 160, or at least 170 identical contiguous amino acid residues as compared to any one of the amino acid sequences set forth in SEQ ID NO: 734 or any of the adenosine deaminases provided herein.

[0191] In some embodiments, the nucleic acid encoding the base editor fusion protein is a mRNA. The mRNA may comprise modifications, for example, modifications at 3′ or 5′ end of the mRNA. In some embodiments, the mRNA comprises a cap analog.

[0192] In some embodiments, the mRNA comprises at least 1, 2, or 3 nucleotides at the 5′ end that comprises 2′-hydroxyl group, 2′-O-methyl group, or additional 2′ chemical modification or a combination thereof. In some embodiments, the mRNA comprises at least 1, 2, or 3 nucleotides at the 5′ end that comprises 2′-hydroxyl group, 2′-O-methyl group, or additional 2′ chemical modification or a combination thereof. In some embodiments, the mRNA comprises at least 1 nucleotide at the 5′ end that comprises 2′-hydroxyl group, 2′-O-methyl group, or additional 2′ chemical modification or a combination thereof. In some embodiments, the mRNA comprises at least 2 nucleotides at the 5′ end that comprises 2′-hydroxyl group, 2′-O-methyl group, or additional 2′ chemical modification or a combination thereof. In some embodiments, the mRNA comprises at least 3 nucleotides at the 5′ end that comprises 2′-hydroxyl group, 2′-O-methyl group, or additional 2′ chemical modification or a combination thereof. In some embodiments, the mRNA comprises at least 4 nucleotides at the 5′ end that comprises 2′-hydroxyl group, 2′-O-methyl group, or additional 2′ chemical modification or a combination thereof. In some embodiments, the mRNA comprises at least 5 nucleotides at the 5′ end that comprises 2′-hydroxyl group, 2′-O-methyl group, or additional 2′ chemical modification or a combination thereof. In some embodiments, the mRNA comprises at least 6 nucleotides at the 5′ end that comprises 2′-hydroxyl group, 2′-O-methyl group, or additional 2′ chemical modification or a combination thereof. In some embodiments, the mRNA comprises at least 7 nucleotides at the 5′ end that comprises 2′-hydroxyl group, 2′-O-methyl group, or additional 2′ chemical modification or a combination thereof. In some embodiments, the mRNA comprises at least 8 nucleotides at the 5′ end that comprises 2′-hydroxyl group, 2′-O-methyl group, or additional 2′ chemical modification or a combination thereof. In some embodiments, the mRNA comprises at least 9 nucleotides at the 5′ end that comprises 2′-hydroxyl group, 2′-O-methyl group, or additional 2′ chemical modification or a combination thereof. In some embodiments, the mRNA comprises at least 10 nucleotides at the 5′ end that comprises 2′-hydroxyl group, 2′-O-methyl group, or additional 2′ chemical modification or a combination thereof.

[0193] In some embodiments, the mRNA comprises a poly A tail. The poly A tail may be at the 3′ end of the mRNA.

[0194] In some embodiments, the GC % content of the mRNA sequence is greater than or equal to 40%, 41%, 42%, 43%, 44%, 45%, 46%, 47%, 48%, 49%, 50%, 51%, 52%, 53%, 54%, 55%, 56%, 57%, 58%, 59%, 60%, 61%, 62%, 63%, 64%, 65%, 66%, 67%, 68%, 69%, 70%, 71%, 72%, 73%, 74%, 75%, 76%, 77%, 78%, 79%, 80%, 81%, 82%, 83%, 84%, 85%, 86%, 87%, 88%, 89% or 90%. In some embodiments, the GC % content of the mRNA sequence is greater than or equal to 40%, 45%, 50%, 55%, 60%, 65%, 70%, 75% or 80%.

[0195] In some embodiments, the mRNA sequence comprises an adenine tTNA deaminase (TadA) region. In some embodiments, the GC % of the TadA region is greater than or equal to 40%, 41%, 42%, 43%, 44%, 45%, 46%, 47%, 48%, 49%, 50%, 51%, 52%, 53%, 54%, 55%, 56%, 57%, 58%, 59%, 60%, 61%, 62%, 63%, 64%, 65%, 66%, 67%, 68%, 69%, 70%, 71%, 72%, 73%, 74%, 75%, 76%, 77%, 78%, 79%, 80%, 81%, 82%, 83%, 84%, 85%, 86%, 87%, 88%, 89% or 90%. In some embodiments, the GC % content of the TadA region is greater than or equal to 40%, 45%, 50%, 55%, 60%, 65%, 70%, 75% or 80%.

[0196] In some embodiments, the mRNA sequence comprises a Cas9 region. In some embodiments, the GC % of the Cas9 region is greater than or equal to 40%, 41%, 42%, 43%, 44%, 45%, 46%, 47%, 48%, 49%, 50%, 51%, 52%, 53%, 54%, 55%, 56%, 57%, 58%, 59%, 60%, 61%, 62%, 63%, 64%, 65%, 66%, 67%, 68%, 69%, 70%, 71%, 72%, 73%, 74%, 75%, 76%, 77%, 78%, 79%, 80%, 81%, 82%, 83%, 84%, 85%, 86%, 87%, 88%, 89% or 90%. In some embodiments, the GC % content of the Cas9 region is greater than or equal to 40%, 45%, 50%, 55%, 60%, 65%, 70%, 75% or 80%.

[0197] In some embodiments, the mRNA sequence comprises a NLS region. In some embodiments, the GC % of the NLS region is greater than or equal to 40%, 41%, 42%, 43%, 44%, 45%, 46%, 47%, 48%, 49%, 50%, 51%, 52%, 53%, 54%, 55%, 56%, 57%, 58%, 59%, 60%, 61%, 62%, 63%, 64%, 65%, 66%, 67%, 68%, 69%, 70%, 71%, 72%, 73%, 74%, 75%, 76%, 77%, 78%, 79%, 80%, 81%, 82%, 83%, 84%, 85%, 86%, 87%, 88%, 89% or 90%. In some embodiments, the GC % content of the NLS region is greater than or equal to 40%, 45%, 50%, 55%, 60%, 65%, 70%, 75% or 80%.

[0198] In some embodiments, the mRNA sequence comprises a first linker region that connects the TadA region and the Cas9 region. In some embodiments, the GC % of the first linker region is greater than or equal to 40%, 41%, 42%, 43%, 44%, 45%, 46%, 47%, 48%, 49%, 50%, 51%, 52%, 53%, 54%, 55%, 56%, 57%, 58%, 59%, 60%, 61%, 62%, 63%, 64%, 65%, 66%, 67%, 68%, 69%, 70%, 71%, 72%, 73%, 74%, 75%, 76%, 77%, 78%, 79%, 80%, 81%, 82%, 83%, 84%, 85%, 86%, 87%, 88%, 89% or 90%. In some embodiments, the GC % content of the first linker region is greater than or equal to 40%, 45%, 50%, 55%, 60%, 65%, 70%, 75% or 80%.

[0199] In some embodiments, the mRNA sequence comprises a second linker region that connects the Cas9 region and the NLS region. In some embodiments, the GC % of the second linker region is greater than or equal to 40%, 41%, 42%, 43%, 44%, 45%, 46%, 47%, 48%, 49%, 50%, 51%, 52%, 53%, 54%, 55%, 56%, 57%, 58%, 59%, 60%, 61%, 62%, 63%, 64%, 65%, 66%, 67%, 68%, 69%, 70%, 71%, 72%, 73%, 74%, 75%, 76%, 77%, 78%, 79%, 80%, 81%, 82%, 83%, 84%, 85%, 86%, 87%, 88%, 89% or 90%. In some embodiments, the GC % content of the second linker region is greater than or equal to 40%, 45%, 50%, 55%, 60%, 65%, 70%, 75% or 80%.

[0200] In some embodiments, the base editor system as provided herein further comprises a lipid nanoparticle (LNP) enclosing a guide polynucleotide or a nucleic acid encoding the guide polynucleotide (i). In some embodiments, the LNP further encloses a base editor fusion protein comprising a programmable DNA binding domain and a deaminase, or a nucleic acid encoding same (ii). In some embodiments, the base editor system further comprises a second LNP enclosing a base editor fusion protein comprising a programmable DNA binding domain and a deaminase, or a nucleic acid encoding same (ii).

[0201] A base editor system as provided herein can include one or more LNPs. For example, a base editor system may comprise a LNP enclosing both a guide polynucleotide and a nucleic acid encoding the base editor fusion protein, e.g. an mRNA encoding the base editor fusion protein. In another example, a base editor system may comprise a LNP enclosing a guide polynucleotide, e.g. a guide RNA, and a LNP enclosing a nucleic acid, e.g. an mRNA, encoding the base editor fusion protein. LNPs separately enclosing the guide polynucleotide and the base editor fusion protein or mRNA encoding the base editor fusion protein may allow for flexible dosing and administration of the base editor system. For example, a LNP enclosing a guide RNA can be administered first, followed by administration of a LNP enclosing a mRNA encoding the base editor fusion protein. In some embodiments, a LNP enclosing a guide RNA and a second LNP enclosing a mRNA encoding the base editor fusion protein are administered to a subject at the same time. In some embodiments, a LNP enclosing a guide RNA and a LNP enclosing a mRNA encoding the base editor protein are administered to a subject sequentially. In some embodiments, a LNP enclosing mRNA encoding the base editor fusion protein is administered to a subject, followed by multiple administration or doses of a second LNP enclosing a guide RNA after 1 day, 2 days, 3 days, 4 days, 5 days, 6 days, 7 days, 2 weeks, 3 weeks, 4 weeks, 5 weeks, 6 weeks, 7 weeks, 8 weeks, 9 weeks, 10 weeks, 11 weeks, or 12 weeks or more. The multiple doses of the second LNP may be administered with intervals of 1, 2, 3, 4, 5, 6, 7, 8, 9, 10, 11, 12, 13, 14, 15, 16, 17, 18, 19, or 20 days or more.

[0202] In some embodiments, the ratio of the guide polynucleotide and the nucleic acid encoding the base editor fusion protein is about 1:10 to about 10:1 by weight. In some embodiments, the ratio of the guide polynucleotide and the nucleic acid encoding the base editor fusion protein is about 1:1, 1.5:1, 2:1, 3:1, 4:1, 1:1.5, 1:2, 1:3, 1:4 or any ratio between 4:1 or 1:4 by weight. In some embodiments, the ratio of the guide polynucleotide and the nucleic acid encoding the base editor fusion protein can be determined by titration of the guide polynucleotide and the nucleic acid encoding the base editor fusion protein.

[0203] In some embodiments, the molar ratio of the guide polynucleotide and the nucleic acid encoding the base editor fusion protein is about 500:1 to about 1:500.

[0204] In some embodiments, the ratio of the guide polynucleotide and the nucleic acid encoding the base editor fusion protein is about 1000:1 to about 1:1000 by weight. In some embodiments, the ratio of the guide polynucleotide and the nucleic acid encoding the base editor fusion protein is about 1000:1, 950:1, 900:1, 850:1, 800:1, 750:1, 700:1, 650:1, 600:1, 550:1, 500:1, 450:1, 400:1, 350:1, 300:1, 250:1, 200:1, 100:1, 95:1, 90:1, 85:1, 80:1, 75:1, 70:1, 65:1, 60:1, 55:1, 50:1, 45:1, 40:1, 35:1, 30:1, 25:1, 20:1, 19:1, 18:1, 17:1, 17:1, 15:1, 14:1, 13:1, 12:1, 11:1, 10:1, 9:1, 8:1, 7:1, 6:1, 5:1, 4:1, 3:1, 2;1, 1.9:1, 1.8:1, 1.7:1, 1.6:1, 1.5:1, 1.4:1, 1.3:1, 1.2:1, 1.1:1, 1.0:1, 0.9:1, 0.8:1, 0.7:1, 0.6:1, 0.5:1, 0.4:1, 0.3:1, 0.2:1, or 0.1 by weight. In some embodiments, the ratio of the guide polynucleotide and the nucleic acid encoding the base editor fusion protein is about 1:0.1, 1:0.2, 1:0.3, 1:0.4, 1:0.5, 1:0.6, 1:0.7, 1:0.8, 1:0.9, 1:1.0, 1:1.1, 1:1.2, 1:1.3, 1:1.4, 1:1.5, 1:1.6, 1:1.7, 1:1.8, 1:1.9, 1:2, 1:3, 1:4, 1:5, 1:6, 1:7, 1:8, 1:9, 1:10, 1:11, 1:12, 1:13, 1:14, 1:15, 1:16, 1:17, 1:18, 1:19, 1:20, 1:25, 1:30, 1:35, 1:40, 1:45, 1:50, 1:55, 1:60, 1:65, 1:70, 1:75, 1:80, 1:85, 1:90, 1:95, 1:100, 1:150, 1:200, 1:250, 1:300, 1:350, 1:400, 1:450, 1:500, 1:550, 1:600, 1:650, 1:700, 1:750, 1:800, 1:850, 1:900, 1:950, or 1:1000 by weight. In some embodiments, the ratio of the guide polynucleotide and the nucleic acid encoding the base editor fusion protein is at least about 1000:1, 950:1, 900:1, 850:1, 800:1, 750:1, 700:1, 650:1, 600:1, 550:1, 500:1, 450:1, 400:1, 350:1, 300:1, 250:1, 200:1, 100:1, 95:1, 90:1, 85:1, 80:1, 75:1, 70:1, 65:1, 60:1, 55:1, 50:1, 45:1, 40:1, 35:1, 30:1, 25:1, 20:1, 19:1, 18:1, 17:1, 17:1, 15:1, 14:1, 13:1, 12:1, 11:1, 10:1, 9:1, 8:1, 7:1, 6:1, 5:1, 4:1, 3:1, 2;1, 1.9:1, 1.8:1, 1.7:1, 1.6:1, 1.5:1, 1.4:1, 1.3:1, 1.2:1, 1.1:1, 1.0:1, 0.9:1, 0.8:1, 0.7:1, 0.6:1, 0.5:1, 0.4:1, 0.3:1, 0.2:1, or 0.1 by weight. In some embodiments, the ratio of the guide polynucleotide and the nucleic acid encoding the base editor fusion protein is at least about 1:0.1, 1:0.2, 1:0.3, 1:0.4, 1:0.5, 1:0.6, 1:0.7, 1:0.8, 1:0.9, 1:1.0, 1:1.1, 1:1.2, 1:1.3, 1:1.4, 1:1.5, 1:1.6, 1:1.7, 1:1.8, 1:1.9, 1:2, 1:3, 1:4, 1:5, 1:6, 1:7, 1:8, 1:9, 1:10, 1:11, 1:12, 1:13, 1:14, 1:15, 1:16, 1:17, 1:18, 1:19, 1:20, 1:25, 1:30, 1:35, 1:40, 1:45, 1:50, 1:55, 1:60, 1:65, 1:70, 1:75, 1:80, 1:85, 1:90, 1:95, 1:100, 1:150, 1:200, 1:250, 1:300, 1:350, 1:400, 1:450, 1:500, 1:550, 1:600, 1:650, 1:700, 1:750, 1:800, 1:850, 1:900, 1:950, or 1:1000 by weight. In some embodiments, the ratio of the guide polynucleotide and the nucleic acid encoding the base editor fusion protein is at most about 1000:1, 950:1, 900:1, 850:1, 800:1, 750:1, 700:1, 650:1, 600:1, 550:1, 500:1, 450:1, 400:1, 350:1, 300:1, 250:1, 200:1, 100:1, 95:1, 90:1, 85:1, 80:1, 75:1, 70:1, 65:1, 60:1, 55:1, 50:1, 45:1, 40:1, 35:1, 30:1, 25:1, 20:1, 19:1, 18:1, 17:1, 17:1, 15:1, 14:1, 13:1, 12:1, 11:1, 10:1, 9:1, 8:1, 7:1, 6:1, 5:1, 4:1, 3:1, 2;1, 1.9:1, 1.8:1, 1.7:1, 1.6:1, 1.5:1, 1.4:1, 1.3:1, 1.2:1, 1.1:1, 1.0:1, 0.9:1, 0.8:1, 0.7:1, 0.6:1, 0.5:1, 0.4:1, 0.3:1, 0.2:1, or 0.1 by weight. In some embodiments, the ratio of the guide polynucleotide and the nucleic acid encoding the base editor fusion protein is at most about 1:0.1, 1:0.2, 1:0.3, 1:0.4, 1:0.5, 1:0.6, 1:0.7, 1:0.8, 1:0.9, 1:1.0, 1:1.1, 1:1.2, 1:1.3, 1:1.4, 1:1.5, 1:1.6, 1:1.7, 1:1.8, 1:1.9, 1:2, 1:3, 1:4, 1:5, 1:6, 1:7, 1:8, 1:9, 1:10, 1:11, 1:12, 1:13, 1:14, 1:15, 1:16, 1:17, 1:18, 1:19, 1:20, 1:25, 1:30, 1:35, 1:40, 1:45, 1:50, 1:55, 1:60, 1:65, 1:70, 1:75, 1:80, 1:85, 1:90, 1:95, 1:100, 1:150, 1:200, 1:250, 1:300, 1:350, 1:400, 1:450, 1:500, 1:550, 1:600, 1:650, 1:700, 1:750, 1:800, 1:850, 1:900, 1:950, or 1:1000 by weight.

[0205] In some embodiments, the molar ratio of the guide polynucleotide and the nucleic acid encoding the base editor fusion protein is about 10000:1 to about 1:10000. In some embodiments, the molar ratio of the guide polynucleotide and the nucleic acid encoding the base editor fusion protein is about 10000:1, 9500:1, 9000:1, 8500:1, 8000:1, 7500:1, 7000:1, 6500:1, 6000:1, 5500:1, 5000:1, 4500:1, 4000:1, 3500:1, 3000:1, 2500:1, 2000:1, 1500:1, 1000:1, 950:1, 900:1, 850:1, 800:1, 750:1, 700:1, 650:1, 600:1, 550:1, 500:1, 450:1, 400:1, 350:1, 300:1, 250:1, 200:1, 190:1, 180:1, 170:1, 160:1, 150:1, 140:1, 130:1, 120:1, 110:1, 100:1, 95:1, 90:1, 85:1, 80:1, 75:1, 70:1, 69:1, 68:1, 67:1, 66:1, 65:1, 64:1, 63:1, 62:1, 61:1, 60:1, 59:1, 58:1, 57:1, 56:1, 55:1, 54:1, 53:1, 52:1, 51:1, 50:1, 49:1, 48:1, 47:1, 46:1, 45:1, 44:1, 43:1, 42:1, 41:1, 40:1, 39:1, 38:1, 37:1, 36:1, 35:1, 34:1, 33:1, 32:1, 31:1, 30:1, 29:1, 28:1, 27:1, 26:1, 25:1, 24:1, 23:1, 22:1, 21:1, 20:1, 19:1, 18:1, 17:1, 16:1, 15:1, 14:1, 13:1, 12:1, 11:1, 10:1, 9:1, 8:1, 7:1, 6:1, 5:1, 4:1, 3:1, 2:1, 1:1, 0.9:1, 0.8:1, 0.7:1, 0.6:1, 0.5:1, 0.4:1, 0.3:1, 0.2:1, or 0.1:1. In some embodiments, the molar ratio of the guide polynucleotide and the nucleic acid encoding the base editor fusion protein is at least about 1:10000, 1:9500, 1:9000, 1:8500, 1:8000, 1:7500, 1:7000, 1:6500, 1:6000, 1:5500, 1:5000, 1:4500, 1:4000, 1:3500, 1:3000, 1:2500, 1:2000, 1:1500, 1:1000, 1:950, 1:900, 1:850, 1:800, 1:750, 1:700, 1:650, 1:600, 1:550, 1:500, 1:450, 1:400, 1:350, 1:300, 1:250, 1:200, 1:190, 1:180, 1:170, 1:160, 1:150, 1:140, 1:130, 1:120, 1:110, 1:100, 1:95, 1:90, 1:85, 1:80, 1:75, 1:70, 1:69, 1:68, 1:67, 1:66, 1:65, 1:64, 1:63, 1:62, 1:61, 1:60, 1:59, 1:58, 1:57, 1:56, 1:55, 1:54, 1:53, 1:52, 1:51, 1:50, 1:49, 1:48, 1:47, 1:46, 1:45, 1:44, 1:43, 1:42, 1:41, 1:40, 1:39, 1:38, 1:37, 1:36, 1:35, 1:34, 1:33, 1:32, 1:31, 1:30, 1:29, 1:28, 1:27, 1:26, 1:25, 1:24, 1:23, 1:22, 1:21, 1:20, 1:19, 1:18, 1:17, 1:16, 1:15, 1:14, 1:13, 1:12, 1:11, 1:10, 1:9, 1:8, 1:7, 1:6, 1:5, 1:4, 1:3, 1:2, 1:1, 1:0.9, 1:0.8, 1:0.7, 1:0.6, 1:0.5, 1:0.4, 1:0.3, 1:0.2, or 1:0.1. In some embodiments, the molar ratio of the guide polynucleotide and the nucleic acid encoding the base editor fusion protein is at least about 10000:1, 9500:1, 9000:1, 8500:1, 8000:1, 7500:1, 7000:1, 6500:1, 6000:1, 5500:1, 5000:1, 4500:1, 4000:1, 3500:1, 3000:1, 2500:1, 2000:1, 1500:1, 1000:1, 950:1, 900:1, 850:1, 800:1, 750:1, 700:1, 650:1, 600:1, 550:1, 500:1, 450:1, 400:1, 350:1, 300:1, 250:1, 200:1, 190:1, 180:1, 170:1, 160:1, 150:1, 140:1, 130:1, 120:1, 110:1, 100:1, 95:1, 90:1, 85:1, 80:1, 75:1, 70:1, 69:1, 68:1, 67:1, 66:1, 65:1, 64:1, 63:1, 62:1, 61:1, 60:1, 59:1, 58:1, 57:1, 56:1, 55:1, 54:1, 53:1, 52:1, 51:1, 50:1, 49:1, 48:1, 47:1, 46:1, 45:1, 44:1, 43:1, 42:1, 41:1, 40:1, 39:1, 38:1, 37:1, 36:1, 35:1, 34:1, 33:1, 32:1, 31:1, 30:1, 29:1, 28:1, 27:1, 26:1, 25:1, 24:1, 23:1, 22:1, 21:1, 20:1, 19:1, 18:1, 17:1, 16:1, 15:1, 14:1, 13:1, 12:1, 11:1, 10:1, 9:1, 8:1, 7:1, 6:1, 5:1, 4:1, 3:1, 2:1, 1:1, 0.9:1, 0.8:1, 0.7:1, 0.6:1, 0.5:1, 0.4:1, 0.3:1, 0.2:1, or 0.1:1. In some embodiments, the molar ratio of the guide polynucleotide and the nucleic acid encoding the base editor fusion protein is at least about 1:10000, 1:9500, 1:9000, 1:8500, 1:8000, 1:7500, 1:7000, 1:6500, 1:6000, 1:5500, 1:5000, 1:4500, 1:4000, 1:3500, 1:3000, 1:2500, 1:2000, 1:1500, 1:1000, 1:950, 1:900, 1:850, 1:800, 1:750, 1:700, 1:650, 1:600, 1:550, 1:500, 1:450, 1:400, 1:350, 1:300, 1:250, 1:200, 1:190, 1:180, 1:170, 1:160, 1:150, 1:140, 1:130, 1:120, 1:110, 1:100, 1:95, 1:90, 1:85, 1:80, 1:75, 1:70, 1:69, 1:68, 1:67, 1:66, 1:65, 1:64, 1:63, 1:62, 1:61, 1:60, 1:59, 1:58, 1:57, 1:56, 1:55, 1:54, 1:53, 1:52, 1:51, 1:50, 1:49, 1:48, 1:47, 1:46, 1:45, 1:44, 1:43, 1:42, 1:41, 1:40, 1:39, 1:38, 1:37, 1:36, 1:35, 1:34, 1:33, 1:32, 1:31, 1:30, 1:29, 1:28, 1:27, 1:26, 1:25, 1:24, 1:23, 1:22, 1:21, 1:20, 1:19, 1:18, 1:17, 1:16, 1:15, 1:14, 1:13, 1:12, 1:11, 1:10, 1:9, 1:8, 1:7, 1:6, 1:5, 1:4, 1:3, 1:2, 1:1, 1:0.9, 1:0.8, 1:0.7, 1:0.6, 1:0.5, 1:0.4, 1:0.3, 1:0.2, or 1:0.1. In some embodiments, the molar ratio of the guide polynucleotide and the nucleic acid encoding the base editor fusion protein is at most about 10000:1, 9500:1, 9000:1, 8500:1, 8000:1, 7500:1, 7000:1, 6500:1, 6000:1, 5500:1, 5000:1, 4500:1, 4000:1, 3500:1, 3000:1, 2500:1, 2000:1, 1500:1, 1000:1, 950:1, 900:1, 850:1, 800:1, 750:1, 700:1, 650:1, 600:1, 550:1, 500:1, 450:1, 400:1, 350:1, 300:1, 250:1, 200:1, 190:1, 180:1, 170:1, 160:1, 150:1, 140:1, 130:1, 120:1, 110:1, 100:1, 95:1, 90:1, 85:1, 80:1, 75:1, 70:1, 69:1, 68:1, 67:1, 66:1, 65:1, 64:1, 63:1, 62:1, 61:1, 60:1, 59:1, 58:1, 57:1, 56:1, 55:1, 54:1, 53:1, 52:1, 51:1, 50:1, 49:1, 48:1, 47:1, 46:1, 45:1, 44:1, 43:1, 42:1, 41:1, 40:1, 39:1, 38:1, 37:1, 36:1, 35:1, 34:1, 33:1, 32:1, 31:1, 30:1, 29:1, 28:1, 27:1, 26:1, 25:1, 24:1, 23:1, 22:1, 21:1, 20:1, 19:1, 18:1, 17:1, 16:1, 15:1, 14:1, 13:1, 12:1, 11:1, 10:1, 9:1, 8:1, 7:1, 6:1, 5:1, 4:1, 3:1, 2:1, 1:1, 0.9:1, 0.8:1, 0.7:1, 0.6:1, 0.5:1, 0.4:1, 0.3:1, 0.2:1, or 0.1:1. In some embodiments, the molar ratio of the guide polynucleotide and the nucleic acid encoding the base editor fusion protein is at most about 1:10000, 1:9500, 1:9000, 1:8500, 1:8000, 1:7500, 1:7000, 1:6500, 1:6000, 1:5500, 1:5000, 1:4500, 1:4000, 1:3500, 1:3000, 1:2500, 1:2000, 1:1500, 1:1000, 1:950, 1:900, 1:850, 1:800, 1:750, 1:700, 1:650, 1:600, 1:550, 1:500, 1:450, 1:400, 1:350, 1:300, 1:250, 1:200, 1:190, 1:180, 1:170, 1:160, 1:150, 1:140, 1:130, 1:120, 1:110, 1:100, 1:95, 1:90, 1:85, 1:80, 1:75, 1:70, 1:69, 1:68, 1:67, 1:66, 1:65, 1:64, 1:63, 1:62, 1:61, 1:60, 1:59, 1:58, 1:57, 1:56, 1:55, 1:54, 1:53, 1:52, 1:51, 1:50, 1:49, 1:48, 1:47, 1:46, 1:45, 1:44, 1:43, 1:42, 1:41, 1:40, 1:39, 1:38, 1:37, 1:36, 1:35, 1:34, 1:33, 1:32, 1:31, 1:30, 1:29, 1:28, 1:27, 1:26, 1:25, 1:24, 1:23, 1:22, 1:21, 1:20, 1:19, 1:18, 1:17, 1:16, 1:15, 1:14, 1:13, 1:12, 1:11, 1:10, 1:9, 1:8, 1:7, 1:6, 1:5, 1:4, 1:3, 1:2, 1:1, 1:0.9, 1:0.8, 1:0.7, 1:0.6, 1:0.5, 1:0.4, 1:0.3, 1:0.2, or 1:0.1.

[0206] In some embodiments, the ratio of a nucleic acid encoding the guide polynucleotide and the nucleic acid encoding the base editor fusion protein is about 10:1 to about 1:10 by weight. In some embodiments, the ratio of a nucleic acid encoding the guide polynucleotide and the nucleic acid encoding the base editor fusion protein is about 4:1, 3;1, 2:1, 1.5:1, 1:1, 1:1.5, 1:2, 1:3, or 1:4 by weight. In some embodiments, the molar ratio of a nucleic acid encoding the guide polynucleotide and the nucleic acid encoding the base editor fusion protein is about 500:1 to about 1:500.

[0207] In some embodiments, the ratio of a nucleic acid encoding the guide polynucleotide and the nucleic acid encoding the base editor fusion protein is about 1000:1 to about 1:1000 by weight. In some embodiments, the ratio of a nucleic acid encoding the guide polynucleotide and the nucleic acid encoding the base editor fusion protein is about 1000:1, 950:1, 900:1, 850:1, 800:1, 750:1, 700:1, 650:1, 600:1, 550:1, 500:1, 450:1, 400:1, 350:1, 300:1, 250:1, 200:1, 100:1, 95:1, 90:1, 85:1, 80:1, 75:1, 70:1, 65:1, 60:1, 55:1, 50:1, 45:1, 40:1, 35:1, 30:1, 25:1, 20:1, 19:1, 18:1, 17:1, 17:1, 15:1, 14:1, 13:1, 12:1, 11:1, 10:1, 9:1, 8:1, 7:1, 6:1, 5:1, 4:1, 3:1, 2;1, 1.9:1, 1.8:1, 1.7:1, 1.6:1, 1.5:1, 1.4:1, 1.3:1, 1.2:1, 1.1:1, 1.0:1, 0.9:1, 0.8:1, 0.7:1, 0.6:1, 0.5:1, 0.4:1, 0.3:1, 0.2:1, or 0.1 by weight. In some embodiments, the ratio of a nucleic acid encoding the guide polynucleotide and the nucleic acid encoding the base editor fusion protein is about 1:0.1, 1:0.2, 1:0.3, 1:0.4, 1:0.5, 1:0.6, 1:0.7, 1:0.8, 1:0.9, 1:1.0, 1:1.1, 1:1.2, 1:1.3, 1:1.4, 1:1.5, 1:1.6, 1:1.7, 1:1.8, 1:1.9, 1:2, 1:3, 1:4, 1:5, 1:6, 1:7, 1:8, 1:9, 1:10, 1:11, 1:12, 1:13, 1:14, 1:15, 1:16, 1:17, 1:18, 1:19, 1:20, 1:25, 1:30, 1:35, 1:40, 1:45, 1:50, 1:55, 1:60, 1:65, 1:70, 1:75, 1:80, 1:85, 1:90, 1:95, 1:100, 1:150, 1:200, 1:250, 1:300, 1:350, 1:400, 1:450, 1:500, 1:550, 1:600, 1:650, 1:700, 1:750, 1:800, 1:850, 1:900, 1:950, or 1:1000 by weight. In some embodiments, the ratio of a nucleic acid encoding the guide polynucleotide and the nucleic acid encoding the base editor fusion protein is at least about 1000:1, 950:1, 900:1, 850:1, 800:1, 750:1, 700:1, 650:1, 600:1, 550:1, 500:1, 450:1, 400:1, 350:1, 300:1, 250:1, 200:1, 100:1, 95:1, 90:1, 85:1, 80:1, 75:1, 70:1, 65:1, 60:1, 55:1, 50:1, 45:1, 40:1, 35:1, 30:1, 25:1, 20:1, 19:1, 18:1, 17:1, 17:1, 15:1, 14:1, 13:1, 12:1, 11:1, 10:1, 9:1, 8:1, 7:1, 6:1, 5:1, 4:1, 3:1, 2;1, 1.9:1, 1.8:1, 1.7:1, 1.6:1, 1.5:1, 1.4:1, 1.3:1, 1.2:1, 1.1:1, 1.0:1, 0.9:1, 0.8:1, 0.7:1, 0.6:1, 0.5:1, 0.4:1, 0.3:1, 0.2:1, or 0.1 by weight. In some embodiments, the ratio of a nucleic acid encoding the guide polynucleotide and the nucleic acid encoding the base editor fusion protein is at least about 1:0.1, 1:0.2, 1:0.3, 1:0.4, 1:0.5, 1:0.6, 1:0.7, 1:0.8, 1:0.9, 1:1.0, 1:1.1, 1:1.2, 1:1.3, 1:1.4, 1:1.5, 1:1.6, 1:1.7, 1:1.8, 1:1.9, 1:2, 1:3, 1:4, 1:5, 1:6, 1:7, 1:8, 1:9, 1:10, 1:11, 1:12, 1:13, 1:14, 1:15, 1:16, 1:17, 1:18, 1:19, 1:20, 1:25, 1:30, 1:35, 1:40, 1:45, 1:50, 1:55, 1:60, 1:65, 1:70, 1:75, 1:80, 1:85, 1:90, 1:95, 1:100, 1:150, 1:200, 1:250, 1:300, 1:350, 1:400, 1:450, 1:500, 1:550, 1:600, 1:650, 1:700, 1:750, 1:800, 1:850, 1:900, 1:950, or 1:1000 by weight. In some embodiments, the ratio of a nucleic acid encoding the guide polynucleotide and the nucleic acid encoding the base editor fusion protein is at most about 1000:1, 950:1, 900:1, 850:1, 800:1, 750:1, 700:1, 650:1, 600:1, 550:1, 500:1, 450:1, 400:1, 350:1, 300:1, 250:1, 200:1, 100:1, 95:1, 90:1, 85:1, 80:1, 75:1, 70:1, 65:1, 60:1, 55:1, 50:1, 45:1, 40:1, 35:1, 30:1, 25:1, 20:1, 19:1, 18:1, 17:1, 17:1, 15:1, 14:1, 13:1, 12:1, 11:1, 10:1, 9:1, 8:1, 7:1, 6:1, 5:1, 4:1, 3:1, 2;1, 1.9:1, 1.8:1, 1.7:1, 1.6:1, 1.5:1, 1.4:1, 1.3:1, 1.2:1, 1.1:1, 1.0:1, 0.9:1, 0.8:1, 0.7:1, 0.6:1, 0.5:1, 0.4:1, 0.3:1, 0.2:1, or 0.1 by weight. In some embodiments, the ratio of a nucleic acid encoding the guide polynucleotide and the nucleic acid encoding the base editor fusion protein is at most about 1:0.1, 1:0.2, 1:0.3, 1:0.4, 1:0.5, 1:0.6, 1:0.7, 1:0.8, 1:0.9, 1:1.0, 1:1.1, 1:1.2, 1:1.3, 1:1.4, 1:1.5, 1:1.6, 1:1.7, 1:1.8, 1:1.9, 1:2, 1:3, 1:4, 1:5, 1:6, 1:7, 1:8, 1:9, 1:10, 1:11, 1:12, 1:13, 1:14, 1:15, 1:16, 1:17, 1:18, 1:19, 1:20, 1:25, 1:30, 1:35, 1:40, 1:45, 1:50, 1:55, 1:60, 1:65, 1:70, 1:75, 1:80, 1:85, 1:90, 1:95, 1:100, 1:150, 1:200, 1:250, 1:300, 1:350, 1:400, 1:450, 1:500, 1:550, 1:600, 1:650, 1:700, 1:750, 1:800, 1:850, 1:900, 1:950, or 1:1000 by weight.

[0208] In some embodiments, the molar ratio of a nucleic acid encoding the guide polynucleotide and the nucleic acid encoding the base editor fusion protein is about 10000:1 to about 1:10000. In some embodiments, the molar ratio of a nucleic acid encoding the guide polynucleotide and the nucleic acid encoding the base editor fusion protein is about 10000:1, 9500:1, 9000:1, 8500:1, 8000:1, 7500:1, 7000:1, 6500:1, 6000:1, 5500:1, 5000:1, 4500:1, 4000:1, 3500:1, 3000:1, 2500:1, 2000:1, 1500:1, 1000:1, 950:1, 900:1, 850:1, 800:1, 750:1, 700:1, 650:1, 600:1, 550:1, 500:1, 450:1, 400:1, 350:1, 300:1, 250:1, 200:1, 190:1, 180:1, 170:1, 160:1, 150:1, 140:1, 130:1, 120:1, 110:1, 100:1, 95:1, 90:1, 85:1, 80:1, 75:1, 70:1, 69:1, 68:1, 67:1, 66:1, 65:1, 64:1, 63:1, 62:1, 61:1, 60:1, 59:1, 58:1, 57:1, 56:1, 55:1, 54:1, 53:1, 52:1, 51:1, 50:1, 49:1, 48:1, 47:1, 46:1, 45:1, 44:1, 43:1, 42:1, 41:1, 40:1, 39:1, 38:1, 37:1, 36:1, 35:1, 34:1, 33:1, 32:1, 31:1, 30:1, 29:1, 28:1, 27:1, 26:1, 25:1, 24:1, 23:1, 22:1, 21:1, 20:1, 19:1, 18:1, 17:1, 16:1, 15:1, 14:1, 13:1, 12:1, 11:1, 10:1, 9:1, 8:1, 7:1, 6:1, 5:1, 4:1, 3:1, 2:1, 1:1, 0.9:1, 0.8:1, 0.7:1, 0.6:1, 0.5:1, 0.4:1, 0.3:1, 0.2:1, or 0.1:1. In some embodiments, the molar ratio of a nucleic acid encoding the guide polynucleotide and the nucleic acid encoding the base editor fusion protein is at least about 1:10000, 1:9500, 1:9000, 1:8500, 1:8000, 1:7500, 1:7000, 1:6500, 1:6000, 1:5500, 1:5000, 1:4500, 1:4000, 1:3500, 1:3000, 1:2500, 1:2000, 1:1500, 1:1000, 1:950, 1:900, 1:850, 1:800, 1:750, 1:700, 1:650, 1:600, 1:550, 1:500, 1:450, 1:400, 1:350, 1:300, 1:250, 1:200, 1:190, 1:180, 1:170, 1:160, 1:150, 1:140, 1:130, 1:120, 1:110, 1:100, 1:95, 1:90, 1:85, 1:80, 1:75, 1:70, 1:69, 1:68, 1:67, 1:66, 1:65, 1:64, 1:63, 1:62, 1:61, 1:60, 1:59, 1:58, 1:57, 1:56, 1:55, 1:54, 1:53, 1:52, 1:51, 1:50, 1:49, 1:48, 1:47, 1:46, 1:45, 1:44, 1:43, 1:42, 1:41, 1:40, 1:39, 1:38, 1:37, 1:36, 1:35, 1:34, 1:33, 1:32, 1:31, 1:30, 1:29, 1:28, 1:27, 1:26, 1:25, 1:24, 1:23, 1:22, 1:21, 1:20, 1:19, 1:18, 1:17, 1:16, 1:15, 1:14, 1:13, 1:12, 1:11, 1:10, 1:9, 1:8, 1:7, 1:6, 1:5, 1:4, 1:3, 1:2, 1:1, 1:0.9, 1:0.8, 1:0.7, 1:0.6, 1:0.5, 1:0.4, 1:0.3, 1:0.2, or 1:0.1. In some embodiments, the molar ratio of a nucleic acid encoding the guide polynucleotide and the nucleic acid encoding the base editor fusion protein is at least about 10000:1, 9500:1, 9000:1, 8500:1, 8000:1, 7500:1, 7000:1, 6500:1, 6000:1, 5500:1, 5000:1, 4500:1, 4000:1, 3500:1, 3000:1, 2500:1, 2000:1, 1500:1, 1000:1, 950:1, 900:1, 850:1, 800:1, 750:1, 700:1, 650:1, 600:1, 550:1, 500:1, 450:1, 400:1, 350:1, 300:1, 250:1, 200:1, 190:1, 180:1, 170:1, 160:1, 150:1, 140:1, 130:1, 120:1, 110:1, 100:1, 95:1, 90:1, 85:1, 80:1, 75:1, 70:1, 69:1, 68:1, 67:1, 66:1, 65:1, 64:1, 63:1, 62:1, 61:1, 60:1, 59:1, 58:1, 57:1, 56:1, 55:1, 54:1, 53:1, 52:1, 51:1, 50:1, 49:1, 48:1, 47:1, 46:1, 45:1, 44:1, 43:1, 42:1, 41:1, 40:1, 39:1, 38:1, 37:1, 36:1, 35:1, 34:1, 33:1, 32:1, 31:1, 30:1, 29:1, 28:1, 27:1, 26:1, 25:1, 24:1, 23:1, 22:1, 21:1, 20:1, 19:1, 18:1, 17:1, 16:1, 15:1, 14:1, 13:1, 12:1, 11:1, 10:1, 9:1, 8:1, 7:1, 6:1, 5:1, 4:1, 3:1, 2:1, 1:1, 0.9:1, 0.8:1, 0.7:1, 0.6:1, 0.5:1, 0.4:1, 0.3:1, 0.2:1, or 0.1:1. In some embodiments, the molar ratio of a nucleic acid encoding the guide polynucleotide and the nucleic acid encoding the base editor fusion protein is at least about 1:10000, 1:9500, 1:9000, 1:8500, 1:8000, 1:7500, 1:7000, 1:6500, 1:6000, 1:5500, 1:5000, 1:4500, 1:4000, 1:3500, 1:3000, 1:2500, 1:2000, 1:1500, 1:1000, 1:950, 1:900, 1:850, 1:800, 1:750, 1:700, 1:650, 1:600, 1:550, 1:500, 1:450, 1:400, 1:350, 1:300, 1:250, 1:200, 1:190, 1:180, 1:170, 1:160, 1:150, 1:140, 1:130, 1:120, 1:110, 1:100, 1:95, 1:90, 1:85, 1:80, 1:75, 1:70, 1:69, 1:68, 1:67, 1:66, 1:65, 1:64, 1:63, 1:62, 1:61, 1:60, 1:59, 1:58, 1:57, 1:56, 1:55, 1:54, 1:53, 1:52, 1:51, 1:50, 1:49, 1:48, 1:47, 1:46, 1:45, 1:44, 1:43, 1:42, 1:41, 1:40, 1:39, 1:38, 1:37, 1:36, 1:35, 1:34, 1:33, 1:32, 1:31, 1:30, 1:29, 1:28, 1:27, 1:26, 1:25, 1:24, 1:23, 1:22, 1:21, 1:20, 1:19, 1:18, 1:17, 1:16, 1:15, 1:14, 1:13, 1:12, 1:11, 1:10, 1:9, 1:8, 1:7, 1:6, 1:5, 1:4, 1:3, 1:2, 1:1, 1:0.9, 1:0.8, 1:0.7, 1:0.6, 1:0.5, 1:0.4, 1:0.3, 1:0.2, or 1:0.1. In some embodiments, the molar ratio of a nucleic acid encoding the guide polynucleotide and the nucleic acid encoding the base editor fusion protein is at most about 10000:1, 9500:1, 9000:1, 8500:1, 8000:1, 7500:1, 7000:1, 6500:1, 6000:1, 5500:1, 5000:1, 4500:1, 4000:1, 3500:1, 3000:1, 2500:1, 2000:1, 1500:1, 1000:1, 950:1, 900:1, 850:1, 800:1, 750:1, 700:1, 650:1, 600:1, 550:1, 500:1, 450:1, 400:1, 350:1, 300:1, 250:1, 200:1, 190:1, 180:1, 170:1, 160:1, 150:1, 140:1, 130:1, 120:1, 110:1, 100:1, 95:1, 90:1, 85:1, 80:1, 75:1, 70:1, 69:1, 68:1, 67:1, 66:1, 65:1, 64:1, 63:1, 62:1, 61:1, 60:1, 59:1, 58:1, 57:1, 56:1, 55:1, 54:1, 53:1, 52:1, 51:1, 50:1, 49:1, 48:1, 47:1, 46:1, 45:1, 44:1, 43:1, 42:1, 41:1, 40:1, 39:1, 38:1, 37:1, 36:1, 35:1, 34:1, 33:1, 32:1, 31:1, 30:1, 29:1, 28:1, 27:1, 26:1, 25:1, 24:1, 23:1, 22:1, 21:1, 20:1, 19:1, 18:1, 17:1, 16:1, 15:1, 14:1, 13:1, 12:1, 11:1, 10:1, 9:1, 8:1, 7:1, 6:1, 5:1, 4:1, 3:1, 2:1, 1:1, 0.9:1, 0.8:1, 0.7:1, 0.6:1, 0.5:1, 0.4:1, 0.3:1, 0.2:1, or 0.1:1. In some embodiments, the molar ratio of a nucleic acid encoding the guide polynucleotide and the nucleic acid encoding the base editor fusion protein is at most about 1:10000, 1:9500, 1:9000, 1:8500, 1:8000, 1:7500, 1:7000, 1:6500, 1:6000, 1:5500, 1:5000, 1:4500, 1:4000, 1:3500, 1:3000, 1:2500, 1:2000, 1:1500, 1:1000, 1:950, 1:900, 1:850, 1:800, 1:750, 1:700, 1:650, 1:600, 1:550, 1:500, 1:450, 1:400, 1:350, 1:300, 1:250, 1:200, 1:190, 1:180, 1:170, 1:160, 1:150, 1:140, 1:130, 1:120, 1:110, 1:100, 1:95, 1:90, 1:85, 1:80, 1:75, 1:70, 1:69, 1:68, 1:67, 1:66, 1:65, 1:64, 1:63, 1:62, 1:61, 1:60, 1:59, 1:58, 1:57, 1:56, 1:55, 1:54, 1:53, 1:52, 1:51, 1:50, 1:49, 1:48, 1:47, 1:46, 1:45, 1:44, 1:43, 1:42, 1:41, 1:40, 1:39, 1:38, 1:37, 1:36, 1:35, 1:34, 1:33, 1:32, 1:31, 1:30, 1:29, 1:28, 1:27, 1:26, 1:25, 1:24, 1:23, 1:22, 1:21, 1:20, 1:19, 1:18, 1:17, 1:16, 1:15, 1:14, 1:13, 1:12, 1:11, 1:10, 1:9, 1:8, 1:7, 1:6, 1:5, 1:4, 1:3, 1:2, 1:1, 1:0.9, 1:0.8, 1:0.7, 1:0.6, 1:0.5, 1:0.4, 1:0.3, 1:0.2, or 1:0.1.

[0209] Precision genome editing is a growing field with industrial, agricultural, and biomedical applications. One of the dominant genome-editing systems available today is clustered regularly interspaced short palindromic repeats (CRISPR)—CRISPR associated 9 (Cas9). Through the use of a guide RNA (gRNA) with a sequence homologous to that of a sequence of DNA in the target genome (known as the protospacer) adjacent to a specific protospacer-adjacent motif (PAM) comprising the sequence NGG (N is any standard base) in the DNA, Cas9 can be used to create a double-strand break (DSB) at the targeted sequence. Non-homologous end joining (NHEJ) at DSBs can be used to create indels and knock out genes at genetic loci; likewise, homology-directed repair (HDR) can be used, with an introduced template DNA, to insert genes or modify the targeted sequence. A variety of Cas9-based tools have been developed in recent years, including tools that methylate DNA, recognize broader sequence space, or create single-strand nicks. In 2016, Komor et al. described the use of CRISPR-Cas9 to convert a cytosine base to a thymine base without the introduction of a template DNA strand and without the need for DSBs (Komor A C, Kim Y B, Packer M S, et al. Programmable editing of a target base in genomic DNA without double-stranded DNA cleavage. Nature, 2016, 533: 420-4, incorporated herein by reference in its entirety). After the cytidine deaminase domain of rat APOBEC1 was fused to the N-terminus of catalytically-dead Cas9 (dCas9) using the linker XTEN (resulting in a fusion protein called base editor 1, or BET), conversion of cytosine to uracil was observed between position 4 and position 8 within the 20-nt protospacer region of DNA (or, to express it a different way, 13 to 17 nucleotides upstream of the PAM). Of note, any cytosine base within this “window” was amenable to editing, resulting in varied outcomes depending on how many and which cytosines were edited. After DNA replication or repair, each uracil was replaced by a thymine, completing the C to T base editing.3 The next version of base editor (BE2) incorporated a uracil glycosylase inhibitor fused to the C-terminus of dCas9 to help inhibit base excision repair of the uracil bases resulting from the cytidine deaminase activity (which otherwise would act to restore the original cytosine bases); this improved the efficiency of C to T base editing. The final version, BE3, used a Cas9 nickase rather than dCas9; the nickase cut the unedited strand opposite the edited C to T bases, stimulating the removal of the opposing guanidine through eukaryotic mismatch repair. BE2 and BE3 base editing was observed in both human and murine cell lines. The specificity of base editing has been further improved through the addition of mutations to the Cas9 nickase; in similar fashion, Cas9 has been mutated to narrow the width of the editing window from approximately 5 nucleotides to as little as 1-2 nucleotides (Rees H A, Komor A C, Yeh W H, et al. Improving the DNA specificity and applicability of base editing through protein engineering and protein delivery. Nat Commun, 2017, 8: 15790, Kim Y B, Komor A C, Levy J M, et al. Increasing the genome-targeting scope and precision of base editing with engineered Cas9-cytidine deaminase fusions. Nat Biotechnol, 2017, 35: 371-6, each of which is incorporated herein by reference in its entirety).

[0210] An alternative cytosine base editing platform is by linking the activation-induced cytosine deaminase domain PmCDAT to dCas9 (Target-AID), they were able to demonstrate targeted C to T base editing in yeast. Furthermore, an alternative C to T editing strategy was also demonstrated without fusing a deaminase domain to Cas9; instead, a SH3 (Src 3 homology) domain was added to the C-terminus of dCas9 while a SHL (SH3 interaction ligand) was added to PmCDA1.6 Optimization of efficiency was achieved through the use of a Cas9 nickase rather than dCas9. Further, an uracil DNA glycosylase inhibitor was added to enhance base editing in the mammalian CHO cell line. The resulting platform was able to consistently edit bases within 3 to 5 bases of the 18th nucleotide upstream of the PAM sequence (Nishida K et al., Science, 2016, 353: aaf8729).

[0211] A distinct cytosine base editing platform used Cpf1 (also known as Cas12a) instead of Cas9 as the RNA-guided endonuclease. Catalytically-inactive Cpf1 was fused to APOBEC1 (dLbCpf1-BE0), leading to C to T conversion in a human cell line. While the Cas9 base editor variants BE3 and Target-AID recognize the PAM sequence NGG, dLbCpf1-BE0 recognizes the T-rich PAM sequence TTTV. Although base editing was observed between positions 8 and 13 of the protospacer sequence with dLbCpf1-BE0, the introduction of additional mutations into Cpf1 was able to reduce the window to positions 10 to 12. However, narrowing of the base editing window correlated with a decrease in editing efficiency (Li X et al., Nat Biotechnol, 2018, 36: 324-7).

[0212] Cytosine base editing is not wholly predictable; indels can occur at the target site, albeit at lower frequencies that those observed for C to T editing editors. Furthermore, cytosine base editors can occasionally cause C to A or C to G edits rather than the expected C to T edits. Adding linker lengths between Cas9 nickase and the rat APOBEC1 cytosine deaminase domain from 16 amino acids to 32 amino acids, the linker between the Cas9 nickase and the uracil glycosylase inhibitor from 4 amino acids to 9 amino acids, and using a second uracil glycosylase inhibitor was appended to the C-terminus of the new cytosine base editor using another 9 amino acid linker improved cytosine base editor termed “BE4” (Komor A C et al., Sci Adv, 2017, 3: eaao4774).

[0213] By fusing Escherichia coli adenine tTNA deaminase TadA (ecTadA) to dCas9 and mutagenesis of the ecTadA domain in conjunction with selection for editing activity revealed that A106V and D108N mutations yielded a base editor capable of editing adenine to guanine in DNA, termed ABE7.10 (Gaudelli N M et al., Nature, 2017, 551: 464-71). Koblan et al. improved the efficiency of ABE7.10 through modification of nuclear localization signals and codon optimization, yielding a version called ABEmax; a similar approach improved the efficiency of the cytosine base editor BE4.10 Huang et al. performed further development of both adenine and cytosine base editors to use alternative PAMs and to expand their editing windows, thereby increasing their targeting range (Koblan L W et al., Nat Biotechnol, 2018, 36: 843-6). The same has proven to be true of base editors, 12-14 although comparisons of Cas9, cytosine base editors, and adenine base editors using the same gRNAs have shown distinct off-target profiles.

[0214] The same has proven to be true of base editors, although comparisons of Cas9, cytosine base editors, and adenine base editors using the same gRNAs have shown distinct off-target profiles.

[0215] A variety of studies have raised concern about gRNA-independent off-target base editing, caused by the deaminase domain acting in isolation (without the need for engagement of DNA by the Cas9-gRNA complex). Additional studies showed that the gRNA-independent off-target effects of base editors are not limited to DNA. RNA sequencing of cells treated with either cytosine base editors or adenine base editors revealed transcriptome-wide off-target editing of RNA, and that introduction of amino acid substitution in the deaminase domain of adenine base (e.g. R106W) editors reduced off-target editing of RNA without substantially reducing on-target DNA base-editing efficiency. Zuo E, Sun Y, Wei W, et al. Cytosine base editor generates substantial off-target single-nucleotide variants in mouse embryos. Science, 2019, 364: 289-92; Jin S, Zong Y, Gao Q, et al. Cytosine, but not adenine, base editors induce genome-wide off-target mutations in rice. Science, 2019, 364: 292-5; Grünewald J, Zhou R, Garcia S P, et al. Transcriptome-wide off-target RNA editing induced by CRISPR-guided DNA base editors. Nature, 2019, 569: 433-7; Grünewald J, Zhou R, Iyer S, et al. CRISPR DNA base editors with reduced RNA off-target and self-editing activities. Nat Biotechnol, 2019, 37: 1041-8; Zhou C, Sun Y, Yan R, et al. Off-target RNA mutation induced by DNA base editing and its elimination by mutagenesis. Nature, 2019, 571: 275-8; Rees H A, Wilson C, Doman J L, et al. Analysis and minimization of cellular RNA editing by DNA adenine base editors. Sci Adv, 2019, 5: eaax5717, each of which is incorporated herein by reference in its entirety).

[0216] Correction of disease-causing mutations via precision editing with standard Cas9 genome editing has largely required HDR. Since HDR is limited to cells in S or G2 phase of mitosis, precision editing of non-mitotic cells is difficult. However, base editors are not reliant on HDR; the editing of postmitotic cochlear cells in mice is feasible with cytosine base editor BE3. By injecting BE3 and a gRNA in the form of a preassembled ribonucleoprotein via cationic liposomes, serine-33 in beta-catenin was edited to phenylalanine (TCT codon edited to TTT), allowing for the transdifferentiation of supporting cells into hair cells. Base editing of cochlear tissue was confirmed via sequencing, showing an editing rate between 0.7% and 3.0% depending on the region of the cochlea. In contrast, standard Cas9 editing via HDR showed negligible signs of efficacy in cochlear cells. A variant of SaBE3, delivered into the liver via adeno-associated viral (AAV) vectors, was reported to directly correct a pathogenic T to C mutation in the Pah gene with an editing rate as high as 29% and thereby treat the disease phenylketonuria in adult mice. Adenine base editing has also been demonstrated to generate mutations in mice. Yeh W H, Chiang H, Rees H A, et al. In vivo base editing of post-mitotic sensory cells. Nat Commun, 2018, 9: 2184; Villiger L, Grisch-Chan H M, Lindsay H, et al. Treatment of a metabolic liver disease by in vivo genome base editing in adult mice. Nat Med, 2018, 24: 1519-25; Ryu S M, Koo T, Kim K, et al. Adenine base editing in mouse embryos and an adult mouse model of Duchenne muscular dystrophy. Nat Biotechnol, 2018, 36: 536-9; Song C Q, Jiang T, Richter M, et al. Adenine base editing in an adult mouse model of tyrosinaemia. Nat Biomed Eng, 2020, 4: 125-30; Pisciotta L, Favari E, Magnolo L, et al. Characterization of three kindreds with familial combined hypolipidemia caused by loss-of-function mutations of ANGPTL3. Circ Cardiovasc Genet, 2012, 5: 42-50. each of which is incorporated herein by reference in its entirety.

[0217] Provided herein are compositions of nucleobase editor systems that comprises nucleobase editor proteins, complexes, or compounds that is capable of making a modification or conversion to a nucleobase (e.g., A, T, C, G, or U) within a target nucleotide sequence.

[0218] A nucleobase editor or a base editor (BE) refers to an agent comprising a polypeptide that is capable of making a modification to a base (e.g., A, T, C, G, or U) within a nucleic acid sequence (e.g., DNA or RNA). In some embodiments, the base editor is capable of deaminating a base within a nucleic acid. In some embodiments, the base editor is capable of deaminating a base within a DNA molecule. In some embodiments, the base editor is capable of deaminating an adenine (A) in DNA.

[0219] In some embodiments, the base editor comprises a fusion protein comprising a programmable DNA binding protein fused to an adenosine deaminase. In some embodiments, the base editor comprises a fusion protein comprising a Cas9 protein and an adenosine deaminase. In some embodiments, the base editor is a Cas9 nickase (nCas9) fused to an adenosine deaminase. In some embodiments, the base editor is a nuclease-inactive Cas9 (dCas9) fused to an adenosine deaminase. In some embodiments, the base editor comprises a fusion protein comprising a programmable DNA binding protein fused to an cytidine deaminase. In some embodiments, the base editor comprises a fusion protein comprising a Cas9 protein and an cytidine deaminase. In some embodiments, the base editor is a Cas9 nickase (nCas9) fused to an cytidine deaminase. In some embodiments, the base editor is a nuclease-inactive Cas9 (dCas9) fused to an cytidine deaminase. In some embodiments, the base editor further comprises, an inhibitor of base excision repair, for example, a UGI domain. In some embodiments, the fusion protein comprises a Cas9 nickase fused to a deaminase and an inhibitor of base excision repair, such as a UGI or dISN domain. In some embodiments, the dCas9 domain of the fusion protein comprises a D10A and a H840A mutation as numbered in the wild type SpCas9 amino acid sequence. In some embodiments, the UGI comprises the following amino acid sequence:

[0220] >splP14739IUNGI_BPPB2 Uracil-DNA glycosylase inhibitor MTNLSDIIEKETGKQLVIQESILMLPEEVEEVIGNKPESDILVHTAYDESTDENVMLLT S D APE YKPW ALVIQDS NGENKIKML (SEQ ID NO: 735).

[0221] In some embodiments, a base editor system provided herein comprises a base editor fusion protein. For example, a base editor fusion protein may comprise a programmable DNA binding protein and a deaminase, e.g. an adenosine deaminase. In some embodiments, any of the fusion proteins provided herein are base editors. In some embodiments, the programmable DNA binding protein is a Cas9 domain, a Cpf1 domain, a CasX domain, a CasY domain, a Cas12b domain, a C2c2 domain, aC2c3 domain, or an Argonaute domain. In some embodiments, the programmable DNA binding protein is a Cas9 domain. The Cas9 domain may be any of the Cas9 domains or Cas9 proteins (e.g., nuclease inactive Cas9 or Cas9 nickase, or a Cas9 variant from any species) provided herein. In some embodiments, any of the Cas9 domains or Cas9 proteins provided herein may be fused with any of the deaminases provided herein. In some embodiments, the base editor comprises a deaminase, e.g., an adenosine deaminase and a programmable DNA binding protein, e.g., a Cas9 domain joined via a linker. In some embodiments, the base editor comprises a fusion protein comprising a deaminase, e.g., an adenosine deaminase and a programmable DNA binding protein, e.g., a Cas9 domain joined via a linker. In some embodiments, the linker is a peptide linker. In some embodiments, a linker is present between the deaminase domain and the Cas9 domain. In some embodiments, a deaminase and a programmable DNA binding domain are fused via any of the peptide linkers provided herein. For example, an adenosine deaminase and a Cas9 domain may be fused via a linker that comprises between 1 and 200 amino acids. In some embodiments, the adenosine deaminase and the programmable DNA binding protein are fused via a linker that comprises from 1 to 5, 1 to 10, 1 to 20, 1 to 30, 1 to 40, 1 to 50, 1 to 60, 1 to 80, 1 to 100, 1 to 150, 1 to 200, 5 to 10, 5 to 20, 5 to 30, 5 to 40, 5 to 60, 5 to 80, 5 to 100, 5 to 150, 5 to 200, 10 to 20, 10 to 30, 10 to 40, 10 to 50, 10 to 60, 10 to 80, 10 to 100, 10 to 150, 10 to 200, 20 to 30, 20 to 40, 20 to 50, 20 to 60, 20 to 80, 20 to 100, 20 to 150, 20 to 200, 30 to 40, 30 to 50, 30 to 60, 30 to 80, 30 to 100, 30 to 150, 30 to 200, 40 to 50, 40 to 60, 40 to 80, 40 to 100, 40 to 150, 40 to 200, 50 to 60 50 to 80, 50 to 100, 50 to 150, 50 to 200, 60 to 80, 60 to 100, 60 to 150, 60 to 200, 80 to 100, 80 to 150, 80 to 200, 100 to 150, 100 to 200, or 150 to 200 amino acids in length. In some embodiments, the adenosine deaminase and the programmable DNA binding protein are fused via a linker that comprises 4, 16, 32, or 104 amino acids in length. In some embodiments, the adenosine deaminase and the programmable DNA binding protein are fused via a linker that comprises the amino acid sequence of SGSETPGTSESATPES (SEQ ID NO: 736), SGGS (SEQ ID NO: 737), SGGSSGSETPGTSESATPESSGGS (SEQ ID NO: 738), SGGSSGGSSGSETPGTSESATPESSGGSSGGS (SEQ ID NO: 739), or GGSGGSPGSPAGSPTSTEEGTSESATPESGPGTSTEPSEGSAPGSPAGSPTSTEEGTSTE PSEGSAPGTSTEPSEGSAPGTSESATPESGPGSEPATSGGSGGS (SEQ ID NO: 740). In some embodiments, the adenosine deaminase and the programmable DNA binding protein are fused via a linker comprising the amino acid sequence SGSETPGTSESATPES (SEQ ID NO: 736), which may also be referred to as the XTEN linker. In some embodiments, the linker is 24 amino acids in length. In some embodiments, the linker comprises the amino acid sequence SGGSSGGSSGSETPGTSESATPES (SEQ ID NO: 741). In some embodiments, the linker is 40 amino acids in length. In some embodiments, the linker comprises the amino acid sequence SGGSSGGSSGSETPGTSESATPESSGGSSGGSSGGSSGGS (SEQ ID NO: 742). In some embodiments, the linker is 64 amino acids in length. In some embodiments, the linker comprises the amino acid sequence SGGSSGGSSGSETPGTSESATPESSGGSSGGSSGGSSGGSSGSETPGTSESATPESSGGSSG GS (SEQ ID NO: 743). In some embodiments, the linker is 92 amino acids in length. In some embodiments, the linker comprises the amino acid sequence PGSPAGSPTSTEEGTSESATPESGPGTSTEPSEGSAPGSPAGSPTSTEEGTSTEPSEGSAP GTSTEPSEGSAPGTSESATPESGPGSEPATS (SEQ ID NO: 744).

[0222] In some embodiments, a base editor system provided herein comprises a base editor comprising a fusion protein comprising an inhibitor of base repair. In some embodiments, a base editor comprises a fusion protein comprising a cytidine deaminase and a programmable DNA binding domain, e.g. a Cas9 domain. In some embodiments, a base editor comprises a fusion protein comprising an adenosine deaminase and a programmable DNA binding domain, e.g. a Cas9 domain. In some embodiments, the base editor or the fusion protein further comprises an inhibitor of base repair (IBR). In some embodiments, the IBR comprises an inhibitor of inosine base repair. In some embodiments, the IBR is an inhibitor of inosine base excision repair. In some embodiments, the inhibitor of inosine base excision repair is a catalytically inactive inosine specific nuclease (dISN). In some embodiments, a dISN may inhibit (e.g., by steric hindrance) inosine removing enzymes from excising the inosine residue from DNA. For example, catalytically dead inosine glycosylases (e.g., alkyl adenine glycosylase [AAG]) will bind inosine but will not create an abasic site or remove the inosine, thereby sterically blocking the newly-formed inosine moiety from potential DNA damage/repair mechanisms. Thus, this disclosure contemplates a fusion protein comprising a programmable DNA binding protein and an adenosine deaminase further fused to a dISN. This disclosure contemplates a fusion protein comprising any Cas9 domain, for example, a Cas9 nickase (nCas9) domain, a catalytically inactive Cas9 (dCas9) domain, a high fidelity Cas9 domain, or a Cas9 domain with reduced PAM exclusivity. It should be understood that the use of a dISN may increase the editing efficiency of a adenosine deaminase that is capable of catalyzing a A to I change. For example, fusion proteins comprising a dISN domain may be more efficient in deaminating A residues.

[0223] In some embodiments, the base editors provided herein comprise fusion proteins that further comprise one or more nuclear targeting sequences, for example, a nuclear localization sequence (NLS). In some embodiments, the fusion protein comprises multiple NLSs. In some embodiments, the fusion protein comprises a NLS at the N-terminus and the C-terminus of the fusion protein. In some embodiments, a NLS comprises an amino acid sequence that facilitates the importation of a protein, that comprises an NLS, into the cell nucleus. In some embodiments, the NLS is fused to the N-terminus of the fusion protein. In some embodiments, the NLS is fused to the C-terminus of the fusion protein. In some embodiments, the NLS is fused to the N-terminus of the programmable DNA binding protein, e.g. the Cas9. In some embodiments, the NLS is fused to the C-terminus of the programmable DNA binding protein. In some embodiments, the NLS is fused to the N-terminus of the adenosine deaminase. In some embodiments, the NLS is fused to the C-terminus of the adenosine deaminase. In some embodiments, the NLS is fused to the fusion protein via one or more linkers. In some embodiments, the NLS is fused to the fusion protein without a linker. In some embodiments, the NLS comprises an amino acid sequence of any one of the NLS sequences provided or referenced herein. In some embodiments, a NLS comprises the amino acid sequence PKKKRKV (SEQ ID NO: 745) or MDSLLMNRRKFLYQFKNVRWAKGRRETYLC (SEQ ID NO: 746). Additional nuclear localization sequences are known in the art and would be apparent to the skilled artisan. For example, NLS sequences are described in Plank et ah, PCT/EP2000/011690, the contents of which are incorporated herein by reference for their disclosure of exemplary nuclear localization sequences.

[0224] In some embodiments, the fusion proteins provided herein do not comprise a linker. In some embodiments, a linker is present between one or more of the domains or proteins (e.g., adenosine deaminase, napDNAbp, NLS, and/or IBR). In some embodiments, the “−” used in the general architecture above indicates the presence of an optional linker.

[0225] Some aspects of the disclosure provide base editors or fusion proteins that comprise a programmable DNA binding protein and at least two adenosine deaminase domains. Without wishing to be bound by any particular theory, dimerization of adenosine deaminases (e.g., in cis or in trans) may improve the ability (e.g., efficiency) of the fusion protein to modify a nucleic acid base, for example to deaminate adenine. In some embodiments, any of the fusion proteins may comprise 2, 3, 4 or 5 adenosine deaminase domains. In some embodiments, any of the fusion proteins provided herein comprise two adenosine deaminases. In some embodiments, any of the fusion proteins provided herein contain only two adenosine deaminases. In some embodiments, the adenosine deaminases are the same. In some embodiments, the adenosine deaminases are any of the adenosine deaminases provided herein. In some embodiments, the adenosine deaminases are different. In some embodiments, the first adenosine deaminase is any of the adenosine deaminases provided herein, and the second adenosine is any of the adenosine deaminases provided herein, but is not identical to the first adenosine deaminase. In some embodiments, the first adenosine deaminase comprises any one of the mutations provided herein as numbered in SEQ ID NO: 747. In some embodiments, the second adenosine deaminase comprises any one of the mutations provided herein as numbered in SEQ ID NO: 747. In some embodiments, the first adenosine deaminase comprises any one of the mutations provided herein as numbered in SEQ ID NO: 747, and the second adenosine deaminase comprises a wild type adenosine deaminase sequence. In some embodiments, the second adenosine deaminase comprises any one of the mutations provided herein as numbered in SEQ ID NO: 747, and the first adenosine deaminase comprises a wild type adenosine deaminase sequence. As one example, the fusion protein may comprise a first adenosine deaminase and a second adenosine deaminase that both comprise a A106V, D108N, D147Y, and E155V mutation from ecTadA (SEQ ID NO: 747). As another example, the fusion protein may comprise a first adenosine deaminase domain that comprises a A106V, D108N, D147Y, and E155V mutation from ecTadA (SEQ ID NO: 747), and a second adenosine deaminase that comprises a L84F, A106V, D108N, H123Y, D147Y, E155V, and 1156F mutation from ecTadA (SEQ ID NO: 747).

[0226] In some embodiments, the adenosine deaminase comprises the amino acid sequence: MSEVEFSHEYWMRHALTLAKRAWDEREVPVGAVLVHNNRVIGEGWNRPIGRHDPTAH AEIMALRQGGLVMQNYRLIDATLYVTLEPCVMCAGAMIHSRIGRVVFGARDAKTGAAG SLMDVLHHPGMNHRVEITEGILADECAALLSDFFRMRRQEIKAQKKAQSSTD (SEQ ID NO: 747).

[0227] In some embodiments, the fusion protein comprises two adenosine deaminases (e.g., a first adenosine deaminase and a second adenosine deaminase). In some embodiments, the first adenosine deaminase is N-terminal to the second adenosine deaminase in the fusion protein. In some embodiments, the first adenosine deaminase is C-terminal to the second adenosine deaminase in the fusion protein. In some embodiments, the first adenosine deaminase and the second deaminase are fused directly or via a linker. In some embodiments, the linker is any of the linkers provided herein, for example, any of the linkers described in the “Linkers” section. In some embodiments, the first adenosine deaminase is the same as the second adenosine deaminase. In some embodiments, the first adenosine deaminase and the second adenosine deaminase are any of the adenosine deaminases described herein. In some embodiments, the first adenosine deaminase and the second adenosine deaminase are different. In some embodiments, the first adenosine deaminase is any of the adenosine deaminases provided herein. In some embodiments, the second adenosine deaminase is any of the adenosine deaminases provided herein but is not identical to the first adenosine deaminase. In some embodiments, the first adenosine deaminase is an ecTadA adenosine deaminase. In some embodiments, the first adenosine deaminase comprises an amino acid sequence that is at least 60%, at least 65%, at least 70%, at least 75%, at least 80%, at least 85%, at least 90%, at least 95%, at least 96%, at least 97%, at least 98%, at least 99%, or at least 99.5% identical to the amino acid sequence set forth SEQ ID NO: 747 or to any of the adenosine deaminases provided herein. In some embodiments, the second adenosine deaminase comprises an amino acid sequence that is at least 60%, at least 65%, at least 70%, at least 75%, at least 80%, at least 85%, at least 90%, at least 95%, at least 96%, at least 97%, at least 98%, at least 99%, or at least 99.5% identical to the amino acid sequence set forth SEQ ID NO: 747 or to any of the adenosine deaminases provided herein. In some embodiments, the second adenosine deaminase comprises the amino acid sequence of SEQ ID NO: 747.

[0228] In some embodiments, the fusion proteins provided herein do not comprise a linker. In some embodiments, a linker is present between one or more of the domains or proteins (e.g., first adenosine deaminase, second adenosine deaminase, programmable DNA binding protein, and/or NLS).

[0229] It should be appreciated that the fusion proteins of the present disclosure may comprise one or more additional features. For example, in some embodiments, the fusion protein may comprise cytoplasmic localization sequences, export sequences, such as nuclear export sequences, or other localization sequences, as well as sequence tags that are useful for solubilization, purification, or detection of the fusion proteins. Suitable protein tags provided herein include, but are not limited to, biotin carboxylase carrier protein (BCCP) tags, myc-tags, calmodulin-tags, FLAG-tags, hemagglutinin (HA)-tags, polyhistidine tags, also referred to as histidine tags or His-tags, maltose binding protein (MBP)-tags, nus-tags, glutathione-S-transferase (GST)-tags, green fluorescent protein (GFP)-tags, thioredoxin-tags, S-tags, Softags (e.g., Softag 1, Softag 3), strep-tags, biotin ligase tags, FlAsH tags, V5 tags, and SBP-tags. Additional suitable sequences will be apparent to those of skill in the art. In some embodiments, the fusion protein comprises one or more His tags.

[0230] In some embodiments, the fusion protein comprises an amino acid sequence that is at least 60%, at least 65%, at least 70%, at least 75%, at least 80%, at least 85%, at least 90%, at least 95%, at least 96%, at least 97%, at least 98%, at least 99%, at least 99.5%, at least 99.7%, or at least 99.9% identical to any one of the amino acid sequences listed in Table 4. In some embodiments, the fusion protein comprises any one of the amino acid sequences listed in Table 4. In some embodiments, the sequence of the fusion protein is any one of the amino acid sequences listed in Table 4. In some embodiments, the fusion protein comprises an amino acid sequence that is at least 60%, at least 65%, at least 70%, at least 75%, at least 80%, at least 85%, at least 90%, at least 95%, at least 96%, at least 97%, at least 98%, at least 99%, at least 99.5%, at least 99.7%, or at least 99.9% identical to any one of the amino acid sequences of SEQ ID NOs: 688, 691, 695, 702, 705, and 707. In some embodiments, the fusion protein comprises any one of the amino acid sequences of SEQ ID NOs: 688, 691, 695, 702, 705, and 707. In some embodiments, the sequence of the fusion protein is any one of the amino acid sequences of SEQ ID NOs: 688 and 702.

[0231] In some embodiments, the fusion protein is encoded by the polynucleotide sequence that is at least 60%, at least 65%, at least 70%, at least 75%, at least 80%, at least 85%, at least 90%, at least 95%, at least 96%, at least 97%, at least 98%, at least 99%, at least 99.5%, at least 99.7%, or at least 99.9% identical to any one of the polynucleotide sequences listed in Table 4. In some embodiments, the fusion protein is encoded by any one of the polynucleotide sequences listed in Table 23. In some embodiments, the fusion protein is expressed by the polynucleotide sequence that is at least 60%, at least 65%, at least 70%, at least 75%, at least 80%, at least 85%, at least 90%, at least 95%, at least 96%, at least 97%, at least 98%, at least 99%, at least 99.5%, at least 99.7%, or at least 99.9% identical to any one of the polynucleotide sequences listed in Table 4. In some embodiments, the fusion protein is expressed by any one of the polynucleotide sequences listed in Table 4. In some embodiments, the fusion protein is encoded by the polynucleotide sequence that comprises at least 60%, at least 65%, at least 70%, at least 75%, at least 80%, at least 85%, at least 90%, at least 95%, at least 96%, at least 97%, at least 98%, at least 99%, at least 99.5%, at least 99.7%, or at least 99.9% identical to any one of the polynucleotide sequences of SEQ ID NOs: 687, 690, 694, 701, 704, and 706. In some embodiments, the fusion protein is encoded by the polynucleotide sequence that comprises any one of the polynucleotide sequences of SEQ ID NOs: 687, 690, 694, 701, 704, and 706. In some embodiments, the fusion protein is encoded by any one of the polynucleotide sequences of SEQ ID NOs: 687 and 701. In some embodiments, the fusion protein is expressed by the polynucleotide sequence that comprises at least 60%, at least 65%, at least 70%, at least 75%, at least 80%, at least 85%, at least 90%, at least 95%, at least 96%, at least 97%, at least 98%, at least 99%, at least 99.5%, at least 99.7%, or at least 99.9% identical to any one of the polynucleotide sequences of SEQ ID NOs: 687, 690, 694, 701, 704, and 706, or a combination thereof. In some embodiments, the fusion protein is encoded by the polynucleotide sequence that comprises any one of the polynucleotide sequences of SEQ ID NOs: 687, 690, 694, 701, 704, and 706, or a combination thereof. In some embodiments, the fusion protein is expressed by any one of the polynucleotide sequences of SEQ ID NOs: 687, 690, 694, 701, 704, and 706. In some embodiments, the polynucleotide sequence further comprises at least 60%, at least 65%, at least 70%, at least 75%, at least 80%, at least 85%, at least 90%, at least 95%, at least 96%, at least 97%, at least 98%, at least 99%, at least 99.5%, at least 99.7%, or at least 99.9% identical to any one of the polynucleotide sequences of SEQ ID NOs: 687 and 701.

[0232] In some embodiments, the nucleobase editor ABE8.8 comprises a fusion protein comprising the sequence as provided below:

(SEQ ID NO: 734)
MSEVEFSHEYWMRHALTLAKRARDEREVPVGAVLVLNNRVIGEGWNRAIGLHDPTAH
AEIMALRQGGLVMQNYRLIDATLYVTFEPCVMCAGAMIHSRIGRVVFGVRNAKTGAAG
SLMDVLHHPGMNHRVEITEGILADECAALLCRFFRMPRRVFNAQKKAQSSTDSGGSSGG
SSGSETPGTSESATPESSGGSSGGSDKKYSIGLAIGTNSVGWAVITDEYKVPSKKFKVLGN
TDRHSIKKNLIGALLFDSGETAEATRLKRTARRRYTRRKNRICYLQEIFSNEMAKVDDSF
FHRLEESFLVEEDKKHERHPIFGNIVDEVAYHEKYPTIYHLRKKLVDSTDKADLRLIYLA
LAHMIKFRGHFLIEGDLNPDNSDVDKLFIQLVQTYNQLFEENPINASGVDAKAILSARLS
KSRRLENLIAQLPGEKKNGLFGNLIALSLGLTPNFKSNFDLAEDAKLQLSKDTYDDDLDN
LLAQIGDQYADLFLAAKNLSDAILLSDILRVNTEITKAPLSASMIKRYDEHHQDLTLLKA
LVRQQLPEKYKEIFFDQSKNGYAGYIDGGASQEEFYKFIKPILEKMDGTEELLVKLNRED
LLRKQRTFDNGSIPHQIHLGELHAILRRQEDFYPFLKDNREKIEKILTFRIPYYVGPLARGN
SRFAWMTRKSEETITPWNFEEVVDKGASAQSFIERMTNFDKNLPNEKVLPKHSLLYEYF
TVYNELTKVKYVTEGMRKPAFLSGEQKKAIVDLLFKTNRKVTVKQLKEDYFKKIECFDS
VEISGVEDRFNASLGTYHDLLKIIKDKDFLDNEENEDILEDIVLTLTLFEDREMIEERLKTY
AHLFDDKVMKQLKRRRYTGWGRLSRKLINGIRDKQSGKTILDFLKSDGFANRNFMQLIH
DDSLTFKEDIQKAQVSGQGDSLHEHIANLAGSPAIKKGILQTVKVVDELVKVMGRHKPE
NIVIEMARENQTTQKGQKNSRERMKRIEEGIKELGSQILKEHPVENTQLQNEKLYLYYLQ
NGRDMYVDQELDINRLSDYDVDHIVPQSFLKDDSIDNKVLTRSDKNRGKSDNVPSEEVV
KKMKNYWRQLLNAKLITQRKFDNLTKAERGGLSELDKAGFIKRQLVETRQITKHVAQIL
DSRMNTKYDENDKLIREVKVITLKSKLVSDFRKDFQFYKVREINNYHHAHDAYLNAVV
GTALIKKYPKLESEFVYGDYKVYDVRKMIAKSEQEIGKATAKYFFYSNIMNFFKTEITLA
NGEIRKRPLIETNGETGEIVWDKGRDFATVRKVLSMPQVNIVKKTEVQTGGFSKESILPK
RNSDKLIARKKDWDPKKYGGFDSPTVAYSVLVVAKVEKGKSKKLKSVKELLGITIMERS
SFEKNPIDFLEAKGYKEVKKDLIIKLPKYSLFELENGRKRMLASAGELQKGNELALPSKY
VNFLYLASHYEKLKGSPEDNEQKQLFVEQHKHYLDEIIEQISEFSKRVILADANLDKVLS
AYNKHRDKPIREQAENIIHLFTLTNLGAPAAFKYFDTTIDRKRYTSTKEVLDATLIHQSIT
GLYETRIDLSQLGGD.

[0233] Amino acid and nucleotide changes of MA040, MA041, and MA045 compared to MA004: MA004 has codon CGG at nCas9 amino acid position 691 and codon GAC at amino acid position 1135. MA040 has a D1135E nCas9 amino acid mutation; codon 1135 is changed to GAG. MA041 has R691A and D1135E nCas9 amino acid mutations; codon 691 is changed to GCC and co-don 1135 is changed to GAG. MA045 has a R691A nCas9 amino acid mutation; codon 691 is changed to GCC.

[0234] Additional adenosine deaminase mutations and variants are described in Patent Application WO2018119354, which is incorporated herein by reference in its entirety.

[0235] Additional adenosine deaminases useful in the present application would be apparent to the skilled artisan and are within the scope of this disclosure. For example, the adenosine deaminase may be a homolog of an AD AT. Exemplary AD AT homologs include, without limitation:

[0236] Staphylococcus aureus TadA:

(SEQ ID NO: 748)
MGSHMTNDIYFMTLAIEEAKKAAQLGEVPIGAIITKDDEVIARAHNLRE
TLQQPTAHAEHIAIERAAKVLGSWRLEGCTLYVTLEPCVMCAGTIVMSR
IPRVVYGADDPKGGCSGSLMNLLQQSNFNHRAIVDKGVLKEACSTLLTT
FFKNLRANKKSTN
Bacillus subtilis TadA:
(SEQ ID NO: 749)
MTQDELYMKEAIKEAKKAEEKGEVPIGAVLVINGEIIARAHNLRETEQR
SIAHAEMLVIDEACKALGTWRLEGATLYVTLEPCPMCAGAVVLSRVEKV
VFGAFDPKGGCSGTLMNLLQEERFNHQAEVVSGVLEEECGGMLSAFFRE
LRKKKKAARKNLSE
Salmonella typhimurium (S. typhimurium) TadA:
(SEQ ID NO: 750)
MPPAFITGVTSLSDVELDHEYWMRHALTLAKRAWDEREVPVGAVLVHNH
RVIGEGWNRPIGRHDPTAHAEIMALRQGGLVLQNYRLLDTTLYVTLEPC
VMCAGAMVHSRIGRVVFGARDAKTGAAGSLIDVLHHPGMNHRVEIIEGV
LRDECATLLSDFFRMRRQEIKALKKADRAEGAGPAV
Shewanella putrefaciens (S. putrefaciens) TadA:
(SEQ ID NO: 751)
MDEYWMQVAMQMAEKAEAAGEVPVGAVLVKDGQQIATGYNLSISQHDPT
AHAEILCLRSAGKKLENYRLLDATLYITLEPCAMCAGAMVHSRIARVVY
GARDEKTGAAGTVVNLLQHPAFNHQVEVTSGVLAEACSAQLSRFFKRRR
DEKKALKLAQRAQQGIE
Haemophilus influenzae F3031 (H. influenzae) TadA:
(SEQ ID NO: 752)
MDAAKVRSEFDEKMMRYALELADKAEALGEIPVGAVLVDDARNIIGEGW
NLSIVQSDPTAHAEIIALRNGAKNIQNYRLLNSTLYVTLEPCTMCAGAI
LHSRIKRLVFGASDYKTGAIGSRFHFFDDYKMNHTLEITSGVLAEECSQ
KLSTFFQKRREEKKIEKALLKSLSDK
Caulobacter crescentus (C. crescentus) TadA:
(SEQ ID NO: 753)
MRTDESEDQDHRMMRLALDAARAAAEAGETPVGAVILDPSTGEVIATAG
NGPIAAHDPTAHAEIAAMRAAAAKLGNYRLTDLTLVVTLEPCAMCAGAI
SHARIGRVVFGADDPKGGAVVHGPKFFAQPTCHWRPEVTGGVLADESAD
LLRGFFRARRKAKI
Geobacter sulfurreducens (G. sulfurreducens) TadA:
(SEQ ID NO: 754)
MSSLKKTPIRDDAYWMGKAIREAAKAAARDEVPIGAVIVRDGAVIGRGH
NLREGSNDPSAHAEMIAIRQAARRSANWRLTGATLYVTLEPCLMCMGAI
ILARLERVVFGCYDPKGGAAGSLYDLSADPRLNHQVRLSPGVCQEECGT
MLSDFFRDLRRRKKAKATPALFIDERKVPPEP

[0237] In other aspects, the disclosure provides base-editing systems and methods for editing a polynucleotide. For example, provided herein are genome/base-editing systems and methods for editing a polynucleotide encoding ANGPTL3 and variants thereof. To edit a target gene, a target gene polynucleotide may contact the systems disclosed herein comprising a sgRDNA and a adenosine base editor protein, wherein the sgRDNA comprises a spacer sequence as disclosed herein and a tracrRNA sequence, wherein the spacer sequence hybridizes with a target polynucleotide sequence in a ANGPTL3 gene and the tracrRNA sequence binds the adenosine base editor protein (e.g. a Cas9 component of the adenosine base editor). The sgRDNA therefore can direct the base editor protein to the target polynucleotide sequence to result in a to G modification in the target gene. The target gene or target polynucleotide can be a gene encoding ANGPTL3. The target polynucleotide sequence can be in an ANGPTL3 gene. The modification can reduce or abolish expression of functional ANGPTL3 protein encoded by the ANGPTL3 gene in the cell. The introduction can be performed via a lipid nanoparticle that comprises the composition.

[0238] For example, the sgRDNA and the Adenosine base editor protein may be expressed in a cell where a target gene editing is desired (e.g., a liver cell), to thereby allowing contact of the target gene with the composition disclosed herein (e.g., sgRNA and the Adenosine base editor protein). In some embodiments, the binding of the Adenosine base editor protein to its target polynucleotide sequence in the target gene is directed by a single guide RDNA disclosed herein, e.g., a single guide RDNA comprising (i) a spacer sequence as disclosed herein and (ii) a tracrRNA sequence, wherein the spacer sequence hybridizes with a target polynucleotide sequence in a target gene. Thus, by designing the guide RDNA sequence, the Adenosine base editor protein can be directed to edit any target polynucleotide sequence in the target gene (e.g., target gene encoding ANGPTL3). The guide RDNA sequence can be co-expressed with the Adenosine base editor protein in a cell where editing is desired. To edit a gene encoding the ANGPTL3 protein, the gene is contacted with the systems described herein. A target polynucleotide sequence in a target gene can be contacted with the single guide RDNA disclosed herein and an adenosine base editor protein or a nucleic acid sequence encoding the Adenosine base editor protein, wherein the single guide RDNA directs the Adenosine base editor protein to effect a modification in the target gene (e.g., target gene encoding ANGPTL3). The target polynucleotide sequence can be the gene locus in the genomic DNA of a cell. The cell can be a cultured cell. The cell may be in vivo, in vitro, or ex vivo.

[0239] A base editor system provided herein may comprise a programmable DNA binding protein and a deaminase. As used herein, a deaminase may refer to an enzyme that catalyzes the removal of an amine group from a molecule, or deamination, for example through hydrolysis. In some embodiments, the deaminase is a cytidine deaminase, catalyzing the deamination of cytidine (C) to uridine (U), deoxycytidine (dC) to deoxyuridine (dU), or 5-methyl-cytidine to thymidine (T, 5-methyl-U), respectively. Subsequent DNA repair mechanisms ensure that a dU is replaced by T, as described in Komor et al, Nature, Programmable editing of a target base in genomic DNA without double-stranded DNA cleavage, 533, 420-424 (2016), which is incorporated herein by reference in its entirety. In some embodiments, the deaminase is a cytosine deaminase, catalyzing and promoting the conversion of cytosine to uracil (e.g., in RNA) or thymine (e.g., in DNA). In some embodiments, the deaminase is an adenosine deaminase, catalyzing and promoting the conversion of adenine to guanine. In some embodiments, the deaminase is a naturally-occurring deaminase from an organism, such as a human, chimpanzee, gorilla, monkey, cow, dog, rat, or mouse. In some embodiments, the deaminase is a variant of a naturally-occurring deaminase from an organism, and the variants do not occur in nature. For example, in some embodiments, the deaminase or deaminase domain is at least 50%, at least 55%, at least 60%, at least 65%, at least 70%, at least 75% at least 80%, at least 85%, at least 90%, at least 95%, at least 96%, at least 97%, at least 98%, at least 99%, or at least 99.5% identical to a naturally-occurring deaminase from an organism.

[0240] A cytidine deaminase (or cytosine deaminase) comprises an enzyme that catalyzes the chemical reaction “cytosine+H20->uracil+NH3” or “5-methyl-cytosine+H20->thymine+NH3.” In the context of a gene, such nucleotide change, or mutation, may in turn lead to an amino acid change in the protein, which may affect the protein's function, e.g., loss-of-function or gain-of-function. Subsequent DNA repair mechanisms ensure that uracil bases in DNA are replaced by T, as described in Komor et al. (Nature, Programmable editing of a target base in genomic DNA without double-stranded DNA cleavage, 533, 420-424 (2016), which is incorporated herein by reference in its entirety).

[0241] One exemplary suitable class of cytosine deaminases is the apolipoprotein B mRNA-editing complex (APOBEC) family of cytosine deaminases encompassing eleven proteins that serve to initiate mutagenesis in a controlled and beneficial manner. The apolipoprotein B editing complex 3 (APOBEC3) enzyme provides protection to human cells against a certain HIV-1 strain via the deamination of cytosines in reverse-transcribed viral ssDNA. These cytosine deaminases all require a Zn-coordinating motif (His-X-Glu-X23_26-Pro-Cys-X2_4-Cys (SEQ ID NO: 29)) and bound water molecule for catalytic activity. The glutamic acid residue acts to activate the water molecule to a zinc hydroxide for nucleophilic attack in the deamination reaction. Each family member preferentially deaminates at its own particular “hotspot,” for example, WRC (W is A or T, R is A or G) for hAID, or TTC for hAPOBEC3F. A recent crystal structure of the catalytic domain of APOBEC3G revealed a secondary structure comprising a five-stranded (3-sheet core flanked by six α-helices, which is believed to be conserved across the entire family. The active center loops have been shown to be responsible for both ssDNA binding and in determining “hotspot” identity. Overexpression of these enzymes has been linked to genomic instability and cancer, thus highlighting the importance of sequence-specific targeting. Another suitable cytosine deaminase is the activation-induced cytidine deaminase (AID), which is responsible for the maturation of antibodies by converting cytosines in ssDNA to uracils in a transcription-dependent, strand-biased fashion.

[0242] An adenosine deaminase (or adenine deaminase) comprises an enzyme that catalyzes the hydrolytic deamination of adenosine or deoxy adenosine to inosine or deoxyinosine, respectively. In some embodiments, the adenosine deaminase catalyzes the hydrolytic deamination of adenine or adenosine in deoxyribonucleic acid (DNA). The adenosine deaminases (e.g. engineered adenosine deaminases, evolved adenosine deaminases) provided herein may be from any organism, such as a bacterium. In some embodiments, the deaminase or deaminase domain is a variant of a naturally-occurring deaminase from an organism. In some embodiments, the deaminase or deaminase domain does not occur in nature. For example, in some embodiments, the deaminase or deaminase domain is at least 50%, at least 55%, at least 60%, at least 65%, at least 70%, at least 75% at least 80%, at least 85%, at least 90%, at least 95%, at least 96%, at least 97%, at least 98%, at least 99%, or at least 99.5% identical to a naturally-occurring deaminase. In some embodiments, the adenosine deaminase is from a bacterium, such as, E. coli, S. aureus, S. typhi, S. putrefaciens, H. influenzae, or C. crescentus. In some embodiments, the adenosine deaminase is a TadA deaminase. In some embodiments, the TadA deaminase is an E. coli TadA deaminase. In some embodiments, the TadA deaminase is a truncated E. coli TadA deaminase. For example, the truncated ecTadA may be missing one or more N-terminal amino acids relative to a full-length ecTadA. In some embodiments, the truncated ecTadA may be missing 1, 2, 3, 4, 5, 6, 7, 8, 9, 10, 11, 12, 13, 14, 15, 6, 17, 18, 19, or 20 N-terminal amino acid residues relative to the full length ecTadA. In some embodiments, the truncated ecTadA may be missing 1, 2, 3, 4, 5, 6, 7, 8, 9, 10, 11, 12, 13, 14, 15, 6, 17, 18, 19, or 20 C-terminal amino acid residues relative to the full length ecTadA. In some embodiments, the ecTadA deaminase does not comprise an N-terminal methionine.

[0243] In some embodiments, the adenosine deaminase comprises an amino acid sequence that is at least 60%, at least 65%, at least 70%, at least 75%, at least 80%, at least 85%, at least 90%, at least 95%, at least 96%, at least 97%, at least 98%, at least 99%, or at least 99.5% identical to the amino acid sequence set forth in SEQ ID NO:747 or to any of the adenosine deaminases provided herein. It should be appreciated that adenosine deaminases provided herein may include one or more mutations (e.g., any of the mutations provided herein). The disclosure provides any deaminase domains with a certain percent identity plus any of the mutations or combinations thereof described herein. In some embodiments, the adenosine deaminase comprises an amino acid sequence that has 1, 2, 3, 4, 5, 6, 7, 8, 9, 10, 11, 12, 13, 14, 15, 16, 17, 18, 19, 20, 21, 22, 21, 24, 25, 26, 27, 28, 29, 30, 31, 32, 33, 34, 35, 36, 37, 38, 39, 40, 41, 42, 43, 44, 45, 46, 47, 48, 49, 50, or more mutations compared to the amino acid sequence set forth in SEQ ID NO: 747 or any of the adenosine deaminases provided herein. In some embodiments, the adenosine deaminase comprises an amino acid sequence that has at least 5, at least 10, at least 15, at least 20, at least 25, at least 30, at least 35, at least 40, at least 45, at least 50, at least 60, at least 70, at least 80, at least 90, at least 100, at least 110, at least 120, at least 130, at least 140, at least 150, at least 160, or at least 170 identical contiguous amino acid residues as compared to any one of the amino acid sequences set forth in SEQ ID NO: 747 or any of the adenosine deaminases provided herein. Additional exemplary adenosine deaminase can be found in PCT Application Publication NO. WO2021/207712, which is hereby incorporated by reference in its entirety.

[0244] In some embodiments, the adenine base editor comprises an amino acid sequence that is at least 60%, at least 65%, at least 70%, at least 75%, at least 80%, at least 85%, at least 90%, at least 95%, at least 96%, at least 97%, at least 98%, at least 99%, at least 99.5%, at least 99.7%, or at least 99.9% identical to any one of the amino acid sequences listed in Table 2 or Table 4. In some embodiments, the adenine base editor comprises any one of the amino acid sequences listed in Table 2 or Table 4. In some embodiments, the sequence of the adenine base editor is any one of the amino acid sequences listed in Table 2 or Table 4. In some embodiments, the adenine base editor comprises an amino acid sequence that is at least 60%, at least 65%, at least 70%, at least 75%, at least 80%, at least 85%, at least 90%, at least 95%, at least 96%, at least 97%, at least 98%, at least 99%, at least 99.5%, at least 99.7%, or at least 99.9% identical to any one of the amino acid sequences of SEQ ID NOs: SEQ ID NOs: 688, 691, 695, 702, 705, 707, 718, 720, 722, 724, 726, 728 and 730. In some embodiments, the adenine base editor comprises any one of the amino acid sequences of SEQ ID NOs: 688, 691, 695, 702, 705, 707, 718, 720, 722, 724, 726, 728 and 730. In some embodiments, the sequence of the adenine base editor is any one of the amino acid sequences of SEQ ID NOs: 688, 702, 718, 720, 722, 724, 726, 728 and 730.

[0245] In some embodiments, the adenine base editor is encoded by the polynucleotide sequence that is at least 60%, at least 65%, at least 70%, at least 75%, at least 80%, at least 85%, at least 90%, at least 95%, at least 96%, at least 97%, at least 98%, at least 99%, at least 99.5%, at least 99.7%, or at least 99.9% identical to any one of the polynucleotide sequences listed in Table 2 or Table 4. In some embodiments, the adenine base editor is encoded by any one of the polynucleotide sequences listed in Table 2 or Table 4. In some embodiments, the adenine base editor is expressed by the polynucleotide sequence that is at least 60%, at least 65%, at least 70%, at least 75%, at least 80%, at least 85%, at least 90%, at least 95%, at least 96%, at least 97%, at least 98%, at least 99%, at least 99.5%, at least 99.7%, or at least 99.9% identical to any one of the polynucleotide sequences listed in Table 2 or Table 4. In some embodiments, the adenine base editor is expressed by any one of the polynucleotide sequences listed in Table 2 or Table 4. In some embodiments, the adenine base editor is encoded by the polynucleotide sequence that comprises at least 60%, at least 65%, at least 70%, at least 75%, at least 80%, at least 85%, at least 90%, at least 95%, at least 96%, at least 97%, at least 98%, at least 99%, at least 99.5%, at least 99.7%, or at least 99.9% identical to any one of the polynucleotide sequences of SEQ ID NOs: 687, 690, 694, 701, 704, 706, 717, 719, 721, 723, 725, 727, and 729. In some embodiments, the adenine base editor is encoded by the polynucleotide sequence that comprises any one of the polynucleotide sequences of SEQ ID NOs: 687, 690, 694, 701, 704, 706, 717, 719, 721, 723, 725, 727, and 729. In some embodiments, the adenine base editor is encoded by any one of the polynucleotide sequences of SEQ ID NOs: 687, 701, 717, 719, 721, 723, 725, 727, and 729.

### Prime Editing

[0246] The disclosed gene editing systems can encompass a prime editing CRISPR system or a component thereof. Prime editing is a variation on CRISPR systems which expands the guide RNA's responsibility to serve two purposes: to guide Cas9 to a targeted genomic location, and to serve as an RNA template to copy new sequences into the DNA genome (Anzalone A V et al., Nature volume 576, pages 149-157 (2019)). Similar to CRISPR, prime editing requires the presence of a catalytically modified Cas endonuclease and a single guide RNA. The Cas9 endonuclease is catalytically modified to be a Cas9 nickase which nicks the DNA rather than generating a double-strand break. The Cas9 nickase is fused to a reverse transcriptase. The prime editing guide RNA (pegRNA), is substantially larger than standard sgRNA. The pegRNA is a sgRNA with a primer binding sequence (PBS) and the template containing the desired RNA sequence added at the 3′end. Additional information about prime editing can be found in published PCT application WO2020191245A1, which is incorporated herein in its entirety.

[0247] The hybrid guide gene editing systems disclosed herein can comprise a polymerase. A polymerase functions to catalyze the polymerization of a nucleic acid strand using an existing nucleic acid as a template. Examples of useful polymerases include DNA polymerases and RNA polymerases. The polymerase can work with a nucleic acid programmable nucleotide binding domain or a nucleic acid programmable DNA binding protein (e.g., in the form of fusion proteins or coupled or associated in trans with the hybrid guide nucleic acid sequences). The polymerase can be a RNA-dependent DNA polymerase (e.g., reverse transcriptase) or a DNA-dependent DNA polymerase (e.g., a prokaryotic polymerase, including Pol I, Pol II, or Pol III, or a eukaryotic polymerase, including Pol a, Pol b, Pol g, Pol d, Pol e, or Pol z).

### Editing Efficiency

[0248] The gene editing systems disclosed herein can achieve high efficiency in gene editing with low off-target editing effect. For example, the gene editor protein in the gene editing system with guide nucleic acids comprising deoxyribonucleotide containing motif(s) in the spacer disclosed herein can affect less than 10% editing on all off-target sites as compared to a gene editing system with guide nucleic acid sequence without deoxyribonucleotide. For example, the gene editor protein in the gene editing system with the guide nucleic acid sequence comprising any of the motifs in the spacer sequence disclosed herein can affect less than 7% editing on all off-target sites as compared to a gene editing system with guide nucleic acid sequence without deoxyribonucleotide. The gene editor protein in the gene editing system with the guide nucleic acid sequence comprising any of the motifs in the spacer sequence disclosed herein can affect less than 5% editing on all off-target sites as compared to a gene editing system with guide nucleic acid sequence without deoxyribonucleotide. The gene editor protein in the gene editing system with the guide nucleic acid sequence comprising any of the motifs in the spacer sequence disclosed herein can affect less than 2% editing on all off-target sites as compared to a gene editing system with guide nucleic acid sequence without deoxyribonucleotide. The gene editor protein in the gene editing system with the guide nucleic acid sequence comprising any of the motifs in the spacer sequence disclosed herein can affect less than 1% editing on all off-target sites as compared to a gene editing system with guide nucleic acid sequence without deoxyribonucleotide. The gene editor protein in the gene editing system with the guide nucleic acid sequence comprising any of the motifs in the spacer sequence disclosed herein can affect less than 10%, 9%, 8%, 7%, 6%, 5%, 4%, 3%, 2%, or 1% editing on all off-target sites as compared to a gene editing system with guide nucleic acid sequence without deoxyribonucleotide.

[0249] The gene editor protein in the gene editing system with the guide nucleic acid sequence comprising any of the motifs in the spacer sequence disclosed herein can affect at least 50% editing on the target gene as compared to a gene editing system with guide nucleic acid sequence without deoxyribonucleotide. The gene editor protein in the gene editing system with the guide nucleic acid sequence comprising any of the motifs in the spacer sequence disclosed herein can affect at least 70% editing on the target gene as compared to a gene editing system with guide nucleic acid sequence without deoxyribonucleotide. The gene editor protein in the gene editing system with the guide nucleic acid sequence comprising any of the motifs in the spacer sequence disclosed herein can affect at least 90% editing on the target gene as compared to a gene editing system with guide nucleic acid sequence without deoxyribonucleotide. The gene editor protein in the gene editing system with the guide nucleic acid sequence comprising any of the motifs in the spacer sequence disclosed herein can affect more than 50% editing on the target gene as compared to a gene editing system with guide nucleic acid sequence without deoxyribonucleotide. The gene editor protein in the gene editing system with the guide nucleic acid sequence comprising any of the motifs in the spacer sequence disclosed herein can affect more than 70% editing on the target gene as compared to a gene editing system with guide nucleic acid sequence without deoxyribonucleotide. The gene editor protein in the gene editing system with the guide nucleic acid sequence comprising any of the motifs in the spacer sequence disclosed herein can affect more than 90% editing on the target gene as compared to a gene editing system with guide nucleic acid sequence without deoxyribonucleotide. The gene editor protein in the gene editing system with the guide nucleic acid sequence comprising any of the motifs in the spacer sequence disclosed herein can affect at least 50%, 60%, 70%, 80%, or 90% editing on the target gene as compared to a gene editing system with guide nucleic acid sequence without deoxyribonucleotide. The gene editor protein in the gene editing system with the guide nucleic acid sequence comprising any of the motifs in the spacer sequence disclosed herein can affect more than 50%, 60%, 70%, 80%, or 90% editing on the target gene as compared to a gene editing system with guide nucleic acid sequence without deoxyribonucleotide.

### Gene Editor Protein

[0250] Provided herein are gene editor proteins comprising a nucleic acid-binding domain. The nucleic acid-binding domain may be able to bind to DNA. The nucleic acid-binding domain may be able to bind to RNA. The nucleic acid-binding domain can be a Cas9 domain. The term “Cas9” refers to an RNA guided nuclease comprising a Cas9 protein, or a fragment thereof (e.g., a protein comprising an active, inactive, or partially active DNA cleavage domain of Cas9, and/or the gRNA binding domain of Cas9). A Cas9 nuclease is also referred to as a Casn1 nuclease or a CRISPR (clustered regularly interspaced short palindromic repeat) associated nuclease. Cas9 can refer to a polypeptide with at least or at least about 50%, 60%, 70%, 80%, 90%, 100% sequence identity and/or sequence similarity to a wild type exemplary Cas9 polypeptide (e.g., Cas9 from S. pyogenes). Cas9 can refer to a polypeptide with at most or at most about 50%, 60%, 70%, 80%, 90%, 100% sequence identity and/or sequence similarity to a wild type exemplary Cas9 polypeptide (e.g., from S. pyogenes). Cas9 can refer to the wild type or a modified form of the Cas9 protein that can comprise an amino acid change such as a deletion, insertion, substitution, variant, mutation, fusion, chimera, or any combination thereof.

[0251] Cas9 nuclease sequences and structures of variant Cas9 orthologs have been described in various species. Exemplary species that the Cas9 protein or other components can be from include, but are not limited to, Streptococcus pyogenes, Streptococcus thermophilus, Streptococcus sp., Staphylococcus aureus, Listeria innocua, Lactobacillus gasseri, Francisella novicida, Wolinella succinogenes, Sutterella wadsworthensis, Gamma proteobacterium, Neisseria meningitidis, Campylobacter jejuni, Pasteurella multocida, Fibrobacter succinogene, Rhodospirillum rubrum, Nocardiopsis dassonvillei, Streptomyces pristinaespiralis, Streptomyces viridochromogenes, Streptomyces viridochromogenes, Streptosporangium roseum, Alicyclobacillus acidocaldarius, Bacillus pseudomycoides, Bacillus selenitireducens, Exiguobacterium sibiricum, Lactobacillus delbrueckii, Lactobacillus salivarius, Lactobacillus buchneri, Treponema denticola, Microscilla marina, Burkholderiales bacterium, Polar omonas naphthalenivorans, Polar omonas sp., Crocosphaera watsonii, Cyanothece sp., Microcystis aeruginosa, Synechococcus sp., Acetohalobium arabaticum, Ammonifex degensii, Caldicelulosiruptor becscii, Candidatus Desulforudis, Clostridium botulinum, Clostridium difficile, Finegoldia magna, Natranaerobius thermophilus, Pelotomaculum thermopropionium, Acidithiobacillus caldus, Acidithiobacillus ferrooxidans, Allochromatium vinosum, Marinobacter sp., Nitrosococcus halophilus, Nitrosococcus watsoni, Pseudoalteromonas haloplanktis, Ktedonobacter racemifer, Methanohalobium evestigatum, Anabaena variabilis, Nodularia spumigena, Nostoc sp., Arthrospira maxima, Arthrospira platensis, Arthrospira sp., Lyngbya sp., Microcoleus chthonoplastes, Oscillator ia sp., Petrotoga mobilis, Thermosipho africanus, Streptococcus pasteurianus, Neisseria cinerea, Campylobacter lari, Parvibaculum lavamentivorans, Coryne bacterium diphtheria, or Acaryochloris marina. In some embodiments, the Cas9 protein is from Streptococcus pyogenes. In some embodiments, the Cas9 protein may be from Streptococcus thermophilus. In some embodiments, the Cas9 protein is from Staphylococcus aureus.

[0252] Additional suitable Cas9 nucleases and sequences will be apparent to those of skill in the art based on this disclosure, and such Cas9 nucleases and sequences include Cas9 sequences from the organisms and loci disclosed in Chylinski et al., (2013) RNA Biology 10:5, 726-737; which are incorporated herein by reference.

[0253] The gene editing systems provided herein can comprise a gene editor protein, e.g. a Cas nuclease, with reduced or abolished nuclease activity. For example, a Ca9 protein may be nuclease inactive or may be a Cas9 nickase. Methods for generating a Cas9 protein (or a fragment thereof) having an inactive DNA cleavage domain are known (See, e.g., Jinek et al., Science. 337:816-821 (2012); Qi et al, Cell. 28; 152(5): 1173-83 (2013)). For example, the DNA cleavage domain of Cas9 is known to include two subdomains, the HNH nuclease subdomain and the RuvC1 subdomain. The HNH subdomain cleaves the strand complementary to the gRNA, whereas the RuvC1 subdomain cleaves the non-complementary strand. Mutations within these subdomains can silence the nuclease activity of Cas9. For example, the mutations D10A and H840A completely inactivate the nuclease activity of S. pyogenes Cas9 (Jinek et al., Science. 337:816-821(2012); Qi et al, Cell. 28;152(5): 1173-83 (2013)). The Cas9 nickase suitable for use in accordance with the present disclosure has an active HNH domain and an inactive RuvC domain and is able to cleave only the strand of the target DNA that is bound by the sgRNA (which is the opposite strand of the strand that is being edited via cytidine deamination). The Cas9 nickase of the present disclosure may comprise mutations that inactivate the RuvC domain, e.g., a D10A mutation. It is to be understood that any mutation that inactivates the RuvC domain may be included in a Cas9 nickase, e.g., insertion, deletion, or single or multiple amino acid substitution in the RuvC domain. In a Cas9 nickase described herein, while the RuvC domain is inactivated, the HNH domain remains activate. Thus, while the Cas9 nickase may comprise mutations other than those that inactivate the RuvC domain (e.g., D10A), those mutations do not affect the activity of the HNH domain. In a non-limiting Cas9 nickase example, the histidine at position 840 remains unchanged.

[0254] Additional suitable mutations that inactivate Cas9 will be apparent to those of skill in the art based on this disclosure and knowledge in the field, and are within the scope of this disclosure. Such additional exemplary suitable nuclease-inactive Cas9 domains include, but are not limited to, D839A and/or N863A (See, e.g., Prashant et al, Nature Biotechnology. 2013; 31(9): 833-838, which are incorporated herein by reference), or K603R (See, e.g., Chavez et al., Nature Methods 12, 326-328, 2015, which is incorporated herein by reference). Cas9, dCas9, or Cas9 variant also encompasses Cas9, dCas9, or Cas9 variants from any organism. Also appreciated is that dCas9, Cas9 nickase, or other appropriate Cas9 variants from any organisms may be used in accordance with the present disclosure.

[0255] Cas9 can be a Cas9 from archaea (e.g., nanoarchaea), which constitute a domain and kingdom of single-celled prokaryotic microbes.

[0256] The gene editor protein can comprise a CasX or CasY, or a variant thereof, which have been described in, for example, Burstein et al., Cell Res. 2017 Feb. 21. doi: 10.1038/cr.2017.21.

[0257] The gene editor proteins can comprise high fidelity Cas9 domains. High fidelity Cas9 domains are engineered Cas9 domains comprising one or more mutations that decrease electrostatic interactions between the Cas9 domain and the sugar-phosphate backbone of DNA, as compared to a corresponding wild-type Cas9 domain. Without wishing to be bound by any particular theory, high fidelity Cas9 domains that have decreased electrostatic interactions with the sugar-phosphate backbone of DNA may have less off-target effects. The Cas9 domain can comprise one or more mutations that decreases the association between the Cas9 domain and the sugar-phosphate backbone of DNA. A Cas9 domain can comprise one or more mutations that decreases the association between the Cas9 domain and the sugar-phosphate backbone of DNA by at least 1%, at least 2%, at least 3%, at least 4%, at least 5%, at least 10%, at least 15%, at least 20%, at least 25%, at least 30%, at least 35%, at least 40%, at least 45%, at least 50%, at least 55%, at least 60%, at least 65%, at least 70%, or more. Any of the Cas9 provided herein can comprise one or more of N497X, R661X, Q695X, and/or Q926X mutation as numbered in the wild type Cas9 amino acid sequence or a corresponding amino acid in another Cas9, wherein X is any amino acid. The Cas9 can comprise one or more of N497A, R661A, Q695A, and/or Q926A mutation of the amino acid sequence provided in the wild type Cas9 sequence, or a corresponding mutation as numbered in the wild type Cas9 amino acid sequence or a corresponding amino acid in another Cas9. Cas9 domains with high fidelity have been described in Kleinstiver, B. P., et al., Nature 529, 490-495 (2016); and Slaymaker, I. M., et al., Science 351, 84-88 (2015); the entire contents of each are incorporated herein by reference.

[0258] It should be appreciated that any of the gene editing systems provided herein, may be converted into high fidelity gene editing systems by modifying the Cas9 domain as described herein to generate high fidelity gene editor protein comprising the high fidelity Cas9 domain. The high fidelity Cas9 domain can be a nuclease inactive Cas9 domain or a Cas9 nickase domain.

[0259] The gene editor protein can comprise one or more nuclease domains. A gene editor protein of the disclosure can comprise a HNH or HNH-like nuclease domain, a RuvC or RuvC-like nuclease domain, and/or HEPN-superfamily-like nucleases. HNH or HNH-like domains can comprise a McrA-like fold. HNH or HNH-like domains can comprise two antiparallel O-strands and an α-helix. HNH or HNH-like domains can comprise a metal binding site (e.g., divalent cation binding site). HNH or HNH-like domains can cleave one strand of a target nucleic acid (e.g., complementary strand of the crRNA targeted strand). Proteins that comprise an HNH or HNH-like domain can include endonucleases, colicins, restriction endonucleases, transposases, and DNA packaging factors.

[0260] A gene editor protein can be a Cas9 protein, a Cpf1 protein, a C2c1 protein, a C2c2 protein, a C2c3 protein, Cas3, Cas 5, Cas7, Cas8, Cas10, or complexes of these, dependent upon the particular CRISPR system being used. The gene editor protein can be a Cas9 or a Cpf1 protein. A gene editor protein can have reduced nuclease activity. In some instances, the gene editor protein is a nickase, i.e., it can be modified to cleave one strand of a target nucleic acid duplex. A gene editor protein can be modified to have no nuclease activity, i.e., it does not cleave any strand of a target nucleic acid duplex, or any single strand of a target nucleic acid. Examples of gene editor protein with reduced or no nuclease activity include, but not limited to, a Cas9 with a modification to the HNH and/or RuvC nuclease domains, and a Cpf1 with a modification to the RuvC nuclease domain. Non-limiting examples of such modifications can include D917A, ET006A and D1225A to the RuvC nuclease domain of the F. novicida Cpf1 and alteration of residues D10, G12, G17, E762, H840, N854, N863, H982, H983, A984, D986, and/or A987 of the S. pyogenes Cas9, and their corresponding amino acid residues in other Cpf1 and Cas9 proteins.

[0261] Any variants of Cas9 known in the art can also be the gene editor protein. In some instances, the variant of Cas9 is a catalytically inactive Cas9 (dCas9). A dCas9 can bear mutations at two nuclease domains and thus lack nuclease activity. The dCas9 can function as a programmable sequence-specific DNA-binding protein. dCas9 can be used to physically block the process of transcription, turning off a specific gene, or to shuttle other proteins to a particular site in the genome. As used herein, a “dCas” and “dCas protein” are used interchangeably and refer to a catalytically inactive CRISPR associated protein. In some instances, the dCas protein comprises one or more mutations in a DNA-cleavage domain. The dCas protein can comprise one or more mutations in the RuvC or HNH domain. The dCas protein can comprise one or more mutations in both the RuvC and HNH domain. The dCas can be a fragment of a wild-type Cas molecule. The dCas can comprise a functional domain from a wild-type Cas molecule, wherein the functional domain is chosen from a Reel domain, a bridge helix domain, or a PAM interacting domain. The nuclease activity of the dCas molecule can be reduced by at least 40%, 45%, 50%, 55%, 60%, 65%, 70%, 75%, 80%, 85%), 90%), 95%), 99% compared to that of a corresponding wild type Cas.

[0262] Suitable dCas can be derived from a wild type Cas. The Cas can be from a type I, type II, or type III CRISPR-Cas systems. In some instances, suitable dCas proteins are derived from a Cas1, Cas2, Cas3, Cas4, Cas5, Cas6, Cas7, Cas8, Cas9, or Cas10 molecule. The dCas can be derived from a Cas9 molecule. The dCas9 molecule can be obtained, for example, by introducing point mutations (e.g., substitutions, deletions, or additions) in the Cas9 molecule at the DNA-cleavage domain, e.g., the nuclease domain, e.g., the RuvC and/or HNH domain. See, e.g., Jinek et al., Science (2012) 337:816-21, incorporated by reference herein in its entirety. For example, introducing two point mutations in the RuvC and HNH domains reduces the Cas9 nuclease activity while retaining the Cas9 sgRNA and DNA binding activity. In some instances, the two point mutations within the RuvC and HNH active sites are DIOA and H840A mutations of the S. pyogenes Cas9 molecule. Alternatively, D10 and H840 of the S. pyogenes Cas9 molecule can be deleted to abolish the Cas9 nuclease activity while retaining its sgRNA and DNA binding activity. In some instances, the two point mutations within the RuvC and HNH active sites are DIOA and N580A mutations of the S. aureus Cas9 molecule. The dCas can be an S. aureus dCas9 molecule comprising a mutation at D10 and/or N580. The dCas can be an S. aureus dCas9 molecule comprising DIOA and/or N580A mutations. The dCas can be an S. aureus dCas9 molecule, any variant or mutant, or any fragment thereof.

[0263] Similar mutations can also apply to any other naturally-occurring Cas9 (e.g., Cas9 from other species) or engineered Cas9 molecules. The dCas9 can comprise a Streptococcus pyogenes dCas9 molecule, a Staphylococcus aureus dCas9 molecule, a Campylobacter jejuni dCas9 molecule, a Corynebacterium diphtheria dCas9 molecule, a Eubacterium ventriosum dCas9 molecule, a Streptococcus pasteurianus dCas9 molecule, a Lactobacillus farciminis dCas9 molecule, a Sphaerochaeta globus dCas9 molecule, an Azospirillum (strain B510) dCas9 molecule, a Gluconacetobacter diazotrophicus dCas9 molecule, a Neisseria cinerea dCas9 molecule, a Roseburia intestinalis dCas9 molecule, a Parvibaculum lavamentivorans dCas9 molecule, a Nitratifractor salsuginis (strain DSM 16511) dCas9 molecule, a Campylobacter lari (strain CF89-12) dCas9 molecule, a Streptococcus thermophilus (strain LMD-9) dCas9 molecule, or fragment thereof.

[0264] The gene editor protein disclosed herein can be modified. Such modifications may include the incorporation or fusion of a domain from another polypeptide to the gene editor protein, or replacement of a domain of the gene editor protein with a domain of another polypeptide. For example, a modified the gene editor protein can contain a first domain from a Cas9 or Cpf1 protein and a second domain from a protein other than Cas9 or Cpf1. The modification to include such domains in the modified gene editor protein may confer additional activity on the modified gene editor protein. Such activities can include nuclease activity, methyltransferase activity, demethylase activity, DNA repair activity, DNA damage activity, deamination activity, dismutase activity, alkylation activity, depurination activity, oxidation activity, pyrimidine dimer forming activity, integrase activity, transposase activity, recombinase activity, polymerase activity, ligase activity, helicase activity, photolyase activity, glycosylase activity, acetyltransferase activity, deacetylase activity, kinase activity, phosphatase activity, ubiquitin ligase activity, deubiquitinating activity, adenylation activity, deadenylation activity, SUMOylating activity, deSUMOylating activity, ribosylation activity, deribosylation activity, myristoylation activity or demyristoylation activity) that modifies a polypeptide associated with target nucleic acid (e.g., a histone).

[0265] The gene editor protein can introduce double-stranded breaks or single-stranded breaks in nucleic acid sequences, (e.g., genomic DNA). A nucleic acid sequence can be a target nucleic acid. The gene editor protein can introduce blunt-end cleavage sites or produce cleavage sites having sticky ends, i.e., 5′ or 3′ overhangs. Cpf1, for example, may introduce a staggered DNA double-stranded break with about a 4 or 5 nucleotide (nt) 5′ overhang. A double-stranded break can stimulate a cell's endogenous DNA-repair pathways (e.g., NHEJ or alternative non-homologous end-joining (A-NHEJ). NHEJ can repair a cleaved target nucleic acid without the need for a homologous template. This can result in deletions of the target nucleic acid. Homologous recombination (HR) can occur with a homologous template. The homologous template can comprise sequences that are homologous to sequences flanking the target nucleic acid cleavage site. After a target nucleic acid is cleaved by the gene editor protein, the site of cleavage can be destroyed (e.g., the site may not be accessible for another round of cleavage with a nucleic acid-targeting polynucleotide and site-directed polypeptide).

[0266] The gene editor protein can comprise a nucleic acid binding domain and thus can bind a nucleic acid. The nucleic acid can be a DNA sequence. The DNA sequence can be a target DNA sequence. The nucleic acid binding domain can be a DNA binding domain.

[0267] Any DNA-binding domain can be used in the systems disclosed herein. The DNA binding domain can comprise a zinc finger protein. The zinc finger protein can be non-naturally occurring in that it is engineered to bind to a target site of choice. Beerli et al. (2002) Nature Biotechnol. 20:135-141; Pabo et al. (2001) Ann. Rev. Biochem. 70:313-340; Isalan et al. (2001) Nature Biotechnol. 19:656-660; Segal et al. (2001) Curr. Opin. Biotechnol. 12:632-637; Choo et al. (2000) Curr. Opin. Struct. Biol. 10:411-416. An engineered zinc finger binding domain can have a novel binding specificity, compared to a naturally-occurring zinc finger protein. Engineering methods include, but are not limited to, rational design and various types of selection. Rational design includes, for example, using databases comprising triplet (or quadruplet) nucleotide sequences and individual zinc finger amino acid sequences, in which each triplet or quadruplet nucleotide sequence is associated with one or more amino acid sequences of zinc fingers which bind the particular triplet or quadruplet sequence. See, for example, co-owned U.S. Pat. Nos. 6,453,242 and 6,534,261, incorporated by reference herein in their entireties.

[0268] Exemplary selection methods, including phage display and two-hybrid systems, are disclosed in U.S. Pat. Nos. 5,789,538; 5,925,523; 6,007,988; 6,013,453; 6,410,248; 6,140,466; 6,200,759; and 6,242,568; as well as WO 98/37186; WO 98/53057; WO 00/27878; WO 01/88197 and GB 2,338,237. In addition, enhancement of binding specificity for zinc finger binding domains has been described, for example, in co-owned WO 02/077227.

[0269] The systems described herein can employ a meganuclease (homing endonuclease) DNA-binding domain for binding to the target nucleic acid. Naturally-occurring meganucleases recognize 15-40 base-pair cleavage sites and are commonly grouped into four families: the LAGLIDADG family, the GIY-YIG family, the His-Cyst box family, and the HNH family. Exemplary homing endonucleases include I-SceI, I-Ceul, PI-PspI, PI-Sce, I-SceIV, I-CsmI, I-PanI, I-SceII, I-PpoI, I-SceIII, I-CreI, I-TevI, I-TevII and I-TevIII. Their recognition sequences are known. See also U.S. Pat. Nos. 5,420,032; 6,833,252; Belfort et al. (1997) Nucleic Acids Res. 25:3379-3388; Dujon et al. (1989) Gene 82:115-118; Perler et al. (1994) Nucleic Acids Res. 22, 1125-1127; Jasin (1996) Trends Genet. 12:224-228; Gimble et al. (1996) J. Mol. Biol. 263:163-180; Argast et al. (1998) J. Mol. Biol. 280:345-353 and the New England Biolabs catalogue. In addition, the DNA-binding specificity of homing endonucleases and meganucleases can be engineered to bind non-natural target sites. See, for example, Chevalier et al. (2002) Molec. Cell 10:895-905; Epinat et al. (2003) Nucleic Acids Res. 31:2952-2962; Ashworth et al. (2006) Nature 441:656-659; Paques et al. (2007) Current Gene Therapy 7:49-66; U.S. Patent Publication No. 20070117128. The DNA-binding domains of the homing endonucleases and meganucleases may be altered in the context of the nuclease as a whole (i.e., such that the nuclease includes the cognate cleavage domain) or may be fused to a heterologous cleavage domain.

[0270] The DNA-binding domain of one or more of the nucleases used in the methods and compositions described herein comprises a naturally occurring or engineered (non-naturally occurring) TAL effector DNA binding domain. See, e.g., U.S. Pat. No. 8,586,526, incorporated by reference in its entirety herein.

### Deaminase Domains

[0271] The gene editing systems disclosed herein can comprise a deaminase. As used herein, a “deaminase” may refer to an enzyme that catalyzes the removal of an amine group from a molecule, or deamination, for example through hydrolysis. The deaminase can be a cytidine deaminase, catalyzing the deamination of cytidine (C) to uridine (U), deoxycytidine (dC) to deoxyuridine (dU), or 5-methyl-cytidine to thymidine (T, 5-methyl-U), respectively. Subsequent DNA repair mechanisms ensure that a dU is replaced by T, as described in Komor et al, Nature, Programmable editing of a target base in genomic DNA without double-stranded DNA cleavage, 533, 420-424 (2016), which is incorporated herein by reference in its entirety. The deaminase can be a cytosine deaminase, catalyzing and promoting the conversion of cytosine to uracil (e.g., in RNA) or thymine (e.g., in DNA). The deaminase can be an adenosine deaminase, catalyzing and promoting the conversion of adenine to guanine. The deaminase can be a naturally-occurring deaminase from an organism, such as a human, chimpanzee, gorilla, monkey, cow, dog, rat, or mouse. The deaminase can be a variant of a naturally-occurring deaminase from an organism, and the variants do not occur in nature. For example, the deaminase or deaminase domain can be at least 50%, at least 55%, at least 60%, at least 65%, at least 70%, at least 75% at least 80%, at least 85%, at least 90%, at least 95%, at least 96%, at least 97%, at least 98%, at least 99%, or at least 99.5% identical to a naturally-occurring deaminase from an organism.

[0272] A cytidine deaminase (or cytosine deaminase) comprises an enzyme that catalyzes the chemical reaction “cytosine+H20→uracil+NH3” or “5-methyl-cytosine+H20→thymine+NH3.” In the context of a gene, such nucleotide change, or mutation, may in turn lead to an amino acid change in the protein, which may affect the protein's function, e.g., loss-of-function or gain-of-function. Subsequent DNA repair mechanisms ensure that uracil bases in DNA are replaced by T, as described in Komor et al. (Nature, 533, 420-424 (2016), which is incorporated herein by reference in its entirety).

[0273] One exemplary suitable class of cytosine deaminases is the apolipoprotein B mRNA-editing complex (APOBEC) family of cytosine deaminases encompassing eleven proteins that serve to initiate mutagenesis in a controlled and beneficial manner. The apolipoprotein B editing complex 3 (APOBEC3) enzyme provides protection to human cells against a certain HIV-1 strain via the deamination of cytosines in reverse-transcribed viral ssDNA. These cytosine deaminases all require a Zn-coordinating motif (His-X-Glu-X23_26-Pro-Cys-X2_4-Cys) and bound water molecule for catalytic activity. The glutamic acid residue acts to activate the water molecule to a zinc hydroxide for nucleophilic attack in the deamination reaction. Each family member preferentially deaminates at its own particular “hotspot,” for example, WRC (W is A or T, R is A or G) for hAID, or TTC for hAPOBEC3F. A recent crystal structure of the catalytic domain of APOBEC3G revealed a secondary structure comprising a five-stranded R-sheet core flanked by six α-helices, which is believed to be conserved across the entire family. The active center loops have been shown to be responsible for both ssDNA binding and in determining “hotspot” identity. Overexpression of these enzymes has been linked to genomic instability and cancer, thus highlighting the importance of sequence-specific targeting. Another suitable cytosine deaminase is the activation-induced cytidine deaminase (AID), which is responsible for the maturation of antibodies by converting cytosines in ssDNA to uracils in a transcription-dependent, strand-biased fashion.

[0274] An adenosine deaminase (or adenine deaminase) comprises an enzyme that catalyzes the hydrolytic deamination of adenosine or deoxy adenosine to inosine or deoxyinosine, respectively. The adenosine deaminase can catalyze the hydrolytic deamination of adenine or adenosine in deoxyribonucleic acid (DNA). The adenosine deaminases (e.g., engineered adenosine deaminases, evolved adenosine deaminases) provided herein can be from any organism, such as a bacterium. The deaminase or deaminase domain can be a variant of a naturally-occurring deaminase from an organism. The deaminase or deaminase domain may not occur in nature. For example, the deaminase or deaminase domain can be at least 50%, at least 55%, at least 60%, at least 65%, at least 70%, at least 75% at least 80%, at least 85%, at least 90%, at least 95%, at least 96%, at least 97%, at least 98%, at least 99%, or at least 99.5% identical to a naturally-occurring deaminase. The adenosine deaminase can be from a bacterium, such as, E. coli, S. aureus, S. typhi, S. putrefaciens, H. influenzae, or C. crescentus. The adenosine deaminase can be a TadA deaminase. The TadA deaminase can be an E. coli TadA deaminase. The TadA deaminase can be a truncated E. coli TadA deaminase. For example, the truncated ecTadA may be missing one or more N-terminal amino acids relative to a full-length ecTadA. The truncated ecTadA may be missing 1, 2, 3, 4, 5, 6, 7, 8, 9, 10, 11, 12, 13, 14, 15, 6, 17, 18, 19, or 20 N-terminal amino acid residues relative to the full length ecTadA. The truncated ecTadA may be missing 1, 2, 3, 4, 5, 6, 7, 8, 9, 10, 11, 12, 13, 14, 15, 6, 17, 18, 19, or 20 C-terminal amino acid residues relative to the full length ecTadA. The ecTadA deaminase may not comprise an N-terminal methionine.

[0275] It should be appreciated that adenosine deaminases provided herein may include one or more mutations. Exemplary adenosine deaminase mutations and variants are described in Patent Application WO2018119354, which is incorporated herein by reference in its entirety. Additional adenosine deaminases useful in the present application would be apparent to the skilled artisan and are within the scope of this disclosure.

### Guide Nucleic Acid

[0276] A guide nucleotide sequence can exist as a single nucleotide molecule and comprise two domains: (1) a domain that shares homology to a target nucleic acid and directs binding of a guide nucleotide sequence-gene editor protein to the targeted gene sequence; and (2) a domain that binds a guide nucleotide sequence-gene editor protein. Domain (1) can comprise a spacer sequence. Domain (2) can be referred to as a tracrRNA sequence or equivalent such as a modified tracrRNA. Domain (2) may comprise a stem-loop structure. For example, domain (2) can be identical or homologous to a tracrRNA as provided in Jinek et al., Science 337:816-821(2012), which is incorporated herein by reference. Other examples of gRNAs (e.g., those including domain (2)) can be found in U.S. Patent Application Publication US20160208288 and U.S. Patent Application Publication US20160200779 each of which is herein incorporated by reference in their entirety.

[0277] Methods of using guide nucleotide sequence-gene editor protein, such as Cas9, for site-specific cleavage (e.g., to modify a genome) are known in the art (see e.g., Cong, L. et al., Science 339, 819-823 (2013); Mali, P. et al., Science 339, 823-826 (2013); Hwang, W. Y. et al., Nature biotechnology 31, 227-229 (2013); Jinek, M. et al., eLife 2, e00471 (2013); Dicarlo, J. E. et al., Nucleic acids research (2013); Jiang, W. et al., Nature biotechnology 31, 233-239 (2013); each of which are incorporated herein by reference).

[0278] The guide nucleic acids of the gene editing systems disclosed herein can comprise a DNA-RNA chimera guide (i.e., chRDNA). The chRDNA can be a single guide RDNA. As used herein, the term “RDNA” refers to a nucleic acid comprising a mixture of ribonucleotide (RNA) and deoxynucleotide (DNA). That is, an RDNA comprises at least one ribonucleotide and at least one deoxynucleotide.

[0279] As used herein, the term “sgchRDNA,” “sgRDNA,” “single guide chRDNA,” and “single guide RDNA” are used interchangeably and refer to a polynucleotide comprising a spacer sequence, wherein the spacer sequence comprises a mixture of DNA and RNA nucleotides that is complementary to a sequence in a target nucleic acid. The spacer sequence comprises at least one deoxyribonucleotide and at least one ribonucleotide. The ribose of the ribonucleotide of the spacer sequence can be modified. For example, the ribose can comprise a 2′ hydroxyl group covalently linked to a methyl group (2′-O-Methyl).

[0280] As used herein, the term “sgRNA,” “sgRNA,” “single guide RNA,” and “single guide RNA” are used interchangeably and refer to a polynucleotide comprising a spacer sequence, wherein the spacer sequence comprises solely RNA that is complementary to a sequence in a target nucleic acid. The spacer sequence comprises only ribonucleotide. The ribose of the ribonucleotide of the spacer sequence can be modified. For example, the ribose can comprise a 2′ hydroxyl group covalently linked to a methyl group (2′-O-Methyl).

[0281] The guide nucleic acid disclosed herein can comprise, for example, a deoxyribonucleotide-deoxyribonucleotide-ribonucleotide-deoxyribonucleotide-deoxyribonucleotide (dN-dN-N-dN-dN) motif. The guide nucleic acid disclosed herein can comprise, in another example, a deoxyribonucleotide-deoxyribonucleotide-ribonucleotide-deoxyribonucleotide-deoxyribonucleotide-deoxyribonucleotide (dN-dN-N-dN-dN-dN) motif. The guide nucleic acid comprises a spacer sequence. The spacer sequence comprises at least one deoxyribonucleotide. The spacer sequence can comprise one to ten deoxyribonucleotides. The spacer sequence can comprise one to nine deoxyribonucleotides. The spacer sequence can comprise one to eight deoxyribonucleotides. The spacer sequence can comprise one to seven deoxyribonucleotides. The spacer sequence can comprise one to six deoxyribonucleotides. The spacer sequence can comprise one to five deoxyribonucleotides. The spacer sequence can comprise one to four deoxyribonucleotides. The spacer sequence can comprise one to three deoxyribonucleotides. The spacer sequence can comprise one deoxyribonucleotide. The spacer sequence can comprise two deoxyribonucleotides. The spacer sequence can comprise three deoxyribonucleotides. The spacer sequence can comprise four deoxyribonucleotides. The spacer sequence can comprise five deoxyribonucleotides. The spacer sequence can comprise six deoxyribonucleotides. The spacer sequence can comprise seven deoxyribonucleotides. The spacer sequence can comprise eight deoxyribonucleotides. The spacer sequence can comprise nine deoxyribonucleotides. The spacer sequence can comprise ten deoxyribonucleotides.

[0282] The locations where the ribonucleotide can be replaced with the deoxyribonucleotide can comprise, from the 5′ end of the spacer sequence, position 3, position 4, position 5, position 6, position 7, position 8, position 9, position 10, position 11, position 12, position 13, position 14, position 15, position 16, position 17, position 18, position 19, or position 20. In some instances, the deoxyribonucleotide is located on position 3, 4, 6, 7 and/or 8 from the 5′ end of the spacer sequence. The spacer sequence can comprise deoxyribonucleotides on positions 3, 4, 6 and 7 from the 5′ end of the spacer sequence. The spacer sequence can comprise deoxyribonucleotides on positions 3 and 4 from the 5′ end of the spacer sequence. The spacer sequence can comprise deoxyribonucleotides on positions 6 and 7 from the 5′ end of the spacer sequence. The spacer sequence can comprise deoxyribonucleotides on positions 3, 4, 6, 7 and 8 from the 5′ end of the spacer sequence. The spacer sequence can comprise deoxyribonucleotides on positions 4, 5, 6, 7, 9, 10, 13, and 14 from the 5′ end of the spacer sequence. The spacer sequence can comprise deoxyribonucleotides on positions 3, 4, 5, 6 and 7 from the 5′ end of the spacer sequence. The spacer sequence can comprise deoxyribonucleotides on positions 3, 4, 6 and 7 from the 5′ end of the spacer sequence. The spacer sequence can comprise deoxyribonucleotides on positions 3, 4, 6, 7, 8 and 9 from the 5′ end of the spacer sequence.

[0283] The spacer sequence disclosed herein can comprise at least one modified ribonucleotide. For example, the ribonucleotide can be modified at 2′ hydroxyl group to be covalently linked to a methyl group (i.e., 2′-O-methyl). The spacer sequence can comprise one to three modified ribonucleotides. The spacer sequence can comprise one to two modified ribonucleotides. The spacer sequence can comprise one modified ribonucleotide. The spacer sequence can comprise two modified ribonucleotides. The spacer sequence can comprise three modified ribonucleotides. In some instances, the spacer sequence does not have modified ribonucleotide. The spacer sequence can have only unmodified ribonucleotides. The spacer sequence can have only unmodified ribonucleotides and 2′-deoxyribonucleotides. The modified ribonucleotide can be located on the 5′ end of the spacer sequence. The modified ribonucleotide can be located on position 1, 2, and 3 from the 5′ end of the spacer sequence. The modified ribonucleotide can be located on position 1, 3, and 4 from the 5′ end of the spacer sequence. The modified ribonucleotide can be located on position 1 and 2 from the 5′ end of the spacer sequence. The modified ribonucleotide can be located on position 1 and 3 from the 5′ end of the spacer sequence. The modified ribonucleotide can be located on position 2 and 3 from the 5′ end of the spacer sequence. The modified ribonucleotide can be located on position 3 and 4 from the 5′ end of the spacer sequence. The modified ribonucleotide can be located on position 1 from the 5′ end of the spacer sequence.

[0284] In some instances, the spacer sequence has three modified ribonucleotides located on position 1, 2, and 3 from the 5′ end of the spacer sequence. The spacer sequence can have three modified ribonucleotides located on position 1, 3, and 4 from the 5′ end of the spacer sequence. The spacer sequence can have two modified ribonucleotides located on position 1 and 2 from the 5′ end of the spacer sequence. The spacer sequence can have two modified ribonucleotides located on position 1 and 3 from the 5′ end of the spacer sequence. The spacer sequence can have two modified ribonucleotides located on position 2 and 3 from the 5′ end of the spacer sequence. The spacer sequence can have two modified ribonucleotides located on position 3 and 4 from the 5′ end of the spacer sequence. The spacer sequence can have one modified ribonucleotide located on position 1 from the 5′ end of the spacer sequence.

[0285] In some instances, the spacer sequence comprises five deoxyribonucleotides and two 2′-OMe ribonucleotides. The spacer sequence can comprise five deoxyribonucleotides located on positions 3, 4, 5, 6, and 7 from the 5′ end of the spacer sequence and two 2′-OMe ribonucleotides located on positions 1 and 2 from the 5′ end of the spacer sequence. The spacer can comprise eight deoxyribonucleotides located on positions 4, 5, 6, 7, 9, 10, 13, and 14 from the 5′ end of the spacer sequence and three 2′-OMe ribonucleotides located on positions 1, 2, and 3 from the 5′ end of the spacer sequence. The spacer can comprise four deoxyribonucleotides located on positions 3, 4, 6, and 7 from the 5′ end of the spacer sequence and two 2′-OMe ribonucleotides located on positions 1 and 2 from the 5′ end of the spacer sequence. The spacer can comprise five deoxyribonucleotides located on positions 3, 4, 6, 7, and 8 from the 5′ end of the spacer sequence and two 2′-OMe ribonucleotides located on positions 1 and 2 from the 5′ end of the spacer sequence.

[0286] The spacer sequence can further comprise a phosphorothioate backbone modification (PS). The spacer sequence can comprise at least one phosphorothioate backbone modification. The spacer sequence can comprise at least two phosphorothioate backbone modifications. The spacer sequence can comprise at least three phosphorothioate backbone modifications. The spacer sequence can comprise two or three phosphorothioate backbone modifications. The nucleotide residue of the 5′ terminal of the spacer can comprise a phosphorothioate backbone modification. The phosphorothioate backbone modification can be between position 1 and position 2 from the 5′ end of the spacer sequence. The phosphorothioate backbone modification can be between position 2 and position 3 from the 5′ end of the spacer sequence. The phosphorothioate backbone modification can be between position 3 and position 4 from the 5′ end of the spacer sequence. The spacer sequence can comprise three phosphorothioate backbone modifications and the phosphorothioate backbone modifications are located between position 1 and 2, between position 2 and 3, and between position 3 and 4 from the 5′ end of the spacer sequence. The spacer sequence can comprise two phosphorothioate backbone modifications and the phosphorothioate backbone modifications are located between position 1 and 2 and between position 2 and 3 from the 5′ end of the spacer sequence.

[0287] The spacer sequence can comprise a (2′-OMe)PS(2′-OMe)PS(DNA)PS(DNA)(RNA)(DNA)(DNA)(DNA) motif. The spacer sequence can comprise a (2′-OMe)PS(2′-OMe)PS(DNA)PS(DNA)(RNA)(DNA)(DNA) motif. The spacer sequence can comprise a (2′-OMe)PS(2′-OMe)PS(DNA)PS(DNA)(DNA)(DNA)(DNA) motif. The spacer sequence can comprise a (2′-OMe)PS(2′-OMe)PS(DNA)PS(DNA)(RNA)(DNA)(DNA)(DNA)(DNA) motif. As used herein, “2-OMe” refers to a modified RNA whose 2′ hydroxyl group of the ribose of the RNA covalently linked to a methyl group; “RNA” refers to an unmodified RNA; “DNA” refers to an unmodified DNA.

[0288] The spacer sequence can comprise or consist of SEQ ID NO: 30 or 31. The spacer sequence can comprise or consist of a sequence with at least about 80%, about 85%, about 90%, about 95%, about 96%, about 97%, about 98%, about 99%, about 99.5%, about 100% sequence identity or sequence similarity of SEQ ID NO: 30 or 31. The spacer sequence can comprise or consist of SEQ ID NO: 28 or 29. The spacer sequence can comprise or consist of a sequence with at least about 80%, about 85%, about 90%, about 95%, about 96%, about 97%, about 98%, about 99%, about 99.5%, about 100% sequence identity or sequence similarity of SEQ ID NO: 28 or 29. The spacer sequence can comprise or consist of SEQ ID NO: 11 or 12. The spacer sequence can comprise or consist of a sequence with at least about 80%, about 85%, about 90%, about 95%, about 96%, about 97%, about 98%, about 99%, about 99.5%, about 100% sequence identity or sequence similarity of SEQ ID NO: 11 or 12. The spacer sequence can comprise or consist of SEQ ID NO: 26 or 27. The spacer sequence can comprise or consist of a sequence with at least about 80%, about 85%, about 90%, about 95%, about 96%, about 97%, about 98%, about 99%, about 99.5%, about 100% sequence identity or sequence similarity of SEQ ID NO: 26 or 27. The spacer sequence can comprise or consist of SEQ ID NO: 41. The spacer sequence can comprise or consist of a sequence with at least about 80%, about 85%, about 90%, about 95%, about 96%, about 97%, about 98%, about 99%, about 99.5%, about 100% sequence identity or sequence similarity of SEQ ID NO: 41.

[0289] The guide nucleic acid comprising the spacer sequence disclosed herein can comprise or consist of SEQ ID NOs: 110, 111, 112, or 113. The guide nucleic acid comprising the spacer sequence disclosed herein can comprise or consist of a sequence with at least about 80%, about 85%, about 90%, about 95%, about 96%, about 97%, about 98%, about 99%, about 99.5%, about 100% sequence identity or sequence similarity of SEQ ID NOs: 110, 111, 112, or 113. The guide nucleic acid comprising the spacer sequence disclosed herein can comprise or consist of SEQ ID NOs: 106, 107, 108, or 109. The guide nucleic acid comprising the spacer sequence disclosed herein can comprise or consist of a sequence with at least about 80%, about 85%, about 90%, about 95%, about 96%, about 97%, about 98%, about 99%, about 99.5%, about 100% sequence identity or sequence similarity of SEQ ID NOs: 106, 107, 108, or 109. The guide nucleic acid comprising the spacer sequence disclosed herein can comprise or consist of SEQ ID NOs: 79, 80, 81, or 82. The guide nucleic acid comprising the spacer sequence disclosed herein can comprise or consist of a sequence with at least about 80%, about 85%, about 90%, about 95%, about 96%, about 97%, about 98%, about 99%, about 99.5%, about 100% sequence identity or sequence similarity of SEQ ID NOs: 79, 80, 81, or 82. The guide nucleic acid comprising the spacer sequence disclosed herein can comprise or consist of SEQ ID NOs: 102, 103, 104, or 105. The guide nucleic acid comprising the spacer sequence disclosed herein can comprise or consist of a sequence with at least about 80%, about 85%, about 90%, about 95%, about 96%, about 97%, about 98%, about 99%, about 99.5%, about 100% sequence identity or sequence similarity of SEQ ID NOs: 102, 103, 104, or 105. The guide nucleic acid comprising the spacer sequence disclosed herein can comprise or consist of SEQ ID NOs: 79, 80, or 82. The guide nucleic acid comprising the spacer sequence disclosed herein can comprise or consist of a sequence with at least about 80%, about 85%, about 90%, about 95%, about 96%, about 97%, about 98%, about 99%, about 99.5%, about 100% sequence identity or sequence similarity of SEQ ID NOs: 79, 80, or 82. The guide nucleic acid comprising the spacer sequence disclosed herein can comprise or consist of SEQ ID NO: 132. The guide nucleic acid comprising the spacer sequence disclosed herein can comprise or consist of a sequence with at least about 80%, about 85%, about 90%, about 95%, about 96%, about 97%, about 98%, about 99%, about 99.5%, about 100% sequence identity or sequence similarity of SEQ ID NO: 132.

[0290] A guide nucleic acid as disclosed herein can be a single guide nucleic acid comprising a spacer sequence at the 5′-end and a tracrRNA at the 3′-end. The tracrRNA may be modified. For example, some of the ribonucleotides of the tracrRNA can have one or more 2′-OMe modifications. A tracr nucleic acid (e.g., tracrRNA) can have a length of from about 50 nucleotides to about 150 nucleotides.

[0291] A tracrRNA sequence can comprise more than one duplexed region (e.g., hairpin, hybridized region). A tracrRNA sequence can comprise two duplexed regions. A tracrRNA may comprise a secondary structure. A tracrRNA may contain more than one secondary structure. A tracrRNA sequence may comprise a first secondary structure and a second secondary structure and a first secondary structure comprises more nucleotides than a second secondary structure. A tracrRNA may comprise a first secondary structure, a second secondary structure, and a third secondary structure and said first secondary structure comprises less nucleotides than said second secondary structure and said second secondary structure comprises more nucleotides than said third secondary structure. The number of secondary structures and corresponding nucleotide lengths is not particularly limited.

[0292] Naturally occurring Type V CRISPR systems, unlike Type II CRISPR systems, do not require a tracrRNA for crRNA maturation and cleavage of a target nucleic acid. The tracrRNA can be modified, for example, 2-OMe modification. The tracrRNA can be a sequence of GUUUUAGAGCUAGAAAUAGCAAGUUAAAAUAAGGCUAGUCCGUUAUCAACUUGA AAAAGUGGCACCGAGUCGGUGCUsususu. The tracrRNA can be a sequence of gUUUUAGagcuaGaaauagcaaGUUaAaAuAaggcuaGUccGUUAucAAcuuGaaaaagugGcaccgaguc ggugcusususu.

[0293] A target nucleic acid can comprise DNA, RNA, or combinations thereof and can be a double-stranded nucleic acid or a single-stranded nucleic acid. A spacer sequence can hybridize to a target nucleic acid that is located 5′ or 3′ of a protospacer adjacent motif (PAM), depending upon the particular gene editor protein to be used. A PAM can vary depending upon the gene editor protein to be used. For example, when using the Cas9 from S. pyogenes, the PAM can be a sequence in the target nucleic acid that comprises the sequence 5′-NRR-3′, wherein R can be either A or G, wherein N is any nucleotide, and N is immediately 3′ of the target nucleic acid sequence targeted by the targeting region sequence. A gene editor protein can be modified such that a PAM may be different compared to a PAM for an unmodified gene editor protein. For example, when using Cas9 from S. pyogenes, the Cas9 may be modified such that the PAM no longer comprises the sequence 5′-NRR-3′, but instead comprises the sequence 5′-NNR-3′, wherein R can be either A or G, wherein N is any nucleotide, and N is immediately 3′ of the target nucleic acid sequence targeted by the spacer sequence. Other gene editor proteins may recognize other PAMs and one of skill in the art is able to determine the PAM for any particular gene editor protein. For example, Cpf1 from Francisella novicida was identified as having a 5′-TTN-3′ PAM (Zetsche et al. (Cell; 163(3):759-71(2015))), but this was unable to support site specific cleavage of a target nucleic acid in vivo. Given the similarity in the guide sequence between Francisella novicida and other Cpf1 proteins, such as the Cpf1 from Acidaminocccus sp BV3L6, which utilize a 5′-TTTN-3′ PAM, it is more likely that the Francisella novicida Cpf1 protein recognizes and cleaves a site on a target nucleic acid proximal to a 5′-TTTN-3′ PAM with greater specificity and activity than a site on a target nucleic acid proximal to the truncated 5′-TTN-3′ PAM misidentified by Zetsche et al. The polynucleotides and CRISPR systems described in the present application may be used with a Cpf1 protein (e.g., from Francisella novicida) directed to a site on a target nucleic acid proximal to a 5′-TTTN-3′ PAM.

[0294] A target nucleic acid sequence can be 20 nucleotides. A target nucleic acid can be less than 20 nucleotides. A target nucleic acid can be at least 5, 10, 15, 16, 17, 18, 19, 20, 21, 22, 23, 24, 25, 30 or more nucleotides. A target nucleotide can comprise ranges of nucleotides between about 5-30, and ranges between. The selection of a specific PAMs is within the knowledge of those of skill in the art based on the particular gene editor protein to be used in a given instance.

[0295] The spacer sequence of the present disclosure comprising DNA and RNA on the same strand can be chemically synthesized. Chemical synthesis of polynucleotides is well understood by one of ordinary skill in the art. Chemical synthesis of polynucleotides of the present disclosure can be conducted in solution or on a solid support. Solid phase synthesis is the preferred method of making the guide RNA for early evaluation.

[0296] The guide nucleic acid containing DNA may provide the advantage of increased specificity of targeting target nucleic acids such as DNA. Without being bound by any specific theory, spacer sequences comprising DNA in specific regions as discussed herein present the advantage of reducing off-target binding due to localized structural perturbation in the spacer leading to less off-target site-binding.

[0297] The spacer sequences of the present disclosure can also comprise modifications that, for example, increase stability of the polynucleotide. Such modifications may include phosphorothioates, chiral phosphorothioates, phosphorodithioates, phosphotriesters, aminoalkylphosphotriesters, methyl and other alkyl phosphonates such as 3′-alkylene phosphonates, 5′-alkylene phosphonates, chiral phosphonates, phosphinates, phosphoramidates including 3′-amino phosphoramidate and amino alkylphosphoramidates, phosphorodiamidates, thionophosphoramidates, thiono alkylpho sphonates, thionoalkylpho sphotriesters, selenophosphates, and boranophosphates having normal 3′-5′ linkages, 2-5′ linked analogs, and those having inverted polarity wherein one or more internucleotide linkages is a 3′ to 3′, a 5′ to 5′ or a 2′ to 2′ linkage. Suitable nucleic acid-targeting polynucleotides having inverted polarity can comprise a single 3′ to 3′ linkage at the 3′-most internucleotide linkage (i.e., a single inverted nucleoside residue in which the nucleobase is missing or has a hydroxyl group in place thereof). Various salts (e.g., potassium chloride or sodium chloride), mixed salts, and free acid forms can also be included.

[0298] The deoxyribose or ribose (i.e., sugar moieties) on the deoxynucleotide or nucleotide of the spacer sequences can be modified. The examples of modified sugar moieties include, but are not limited to, 2′-O-methyl, 2′-O-methoxyethyl, 2′-O-aminoethyl, 2′-Fluoro, N3′→P5′ phosphoramidate, 2′dimethylaminooxyethoxy, 2′ 2′dimethylaminoethoxyethoxy, 2′-guanidinium, 2′-O-guanidinium ethyl, carbamate modified sugars, and bicyclic modified sugars. 2′-O-methyl or 2′-O-methoxyethyl modifications promote the A-form or RNA-like conformation in oligonucleotides, increase binding affinity to RNA, and have enhanced nuclease resistance. Modified sugar moieties can also include having an extra bridge bond (e.g., a methylene bridge joining the 2′-O and 4′-C atoms of the ribose in a locked nucleic acid) or sugar analog such as a morpholine ring (e.g., as in a phosphorodiamidate morpholino). Examples of such analogs and/or modified residues include, but are not limited to diaminopurine, 5-fluorouracil, 5-bromouracil, 5-chlorouracil, 5-iodouracil, hypoxanthine, xantine, 4-acetylcytosine, 5-(carboxyhydroxylmethyl)uracil, 5-carboxymethylaminomethyl-2-thiouridine, 5-carboxymethylaminomethyluracil, dihydrouracil, beta-D-galactosylqueosine, inosine, N6-isopentenyladenine, 1-methylguanine, 1-methylinosine, 2,2-dimethylguanine, 2-methyladenine, 2-methylguanine, 3-methylcytosine, 5-methylcytosine, N6-adenine, 7-methylguanine, 5-methylaminomethyluracil, 5-methoxyaminomethyl-2-thiouracil, beta-D-mannosylqueosine, 5′-methoxycarboxymethyluracil, 5-methoxyuracil, 2-methylthio-N6-isopentenyladenine, uracil-5-oxyacetic acid (v), wybutoxosine, pseudouracil, queosine, 2-thiocytosine, 5-methyl-2-thiouracil, 2-thiouracil, 4-thiouracil, 5-methyluracil, uracil-5-oxyacetic acid methylester, 5-methyl-2-thiouracil, 3-(3-amino-3-N-2-carboxypropyl) uracil, (acp3)w, 2,6-diaminopurine, methyl phosphonates, chiral-methyl phosphonates, 2′-O-methyl ribonucleotides, peptide-nucleic acids (PNAs), and the like.

[0299] The spacer sequences of the present disclosure may also contain other nucleic acids, or nucleic acid analogues. An example of a nucleic acid analogue is peptide nucleic acid (PNA).

### Linkers

[0300] Gene editing systems provided herein can comprise linkers that connect one or more components of the gene editing systems. The linkers may be used to link any of the protein or protein domains described herein. The linker may be as simple as a covalent bond, or it may be a polymeric linker many atoms in length. The linker can be a polypeptide or based on amino acids. The linker may not be peptide-like. The linker can be carbon bond, disulfide bond, carbon-heteroatom bond, etc. The linker can be a carbon-nitrogen bond of an amide linkage. The linker can be a cyclic or acyclic, substituted or unsubstituted, branched or unbranched aliphatic or heteroaliphatic linker. The linker can be polymeric (e.g., polyethylene, polyethylene glycol, polyamide, polyester, etc.). The linker can comprise a monomer, dimer, or polymer of aminoalkanoic acid. The linker can comprise an aminoalkanoic acid (e.g., glycine, ethanoic acid, alanine, beta-alanine, 3-aminopropanoic acid, 4-aminobutanoic acid, 5-pentanoic acid, etc.). The linker can comprise a monomer, dimer, or polymer of aminohexanoic acid (Ahx). The linker can be based on a carbocyclic moiety (e.g., cyclopentane, cyclohexane). The linker can comprise a polyethylene glycol moiety (PEG). The linker can comprise amino acids. The linker can comprise a peptide. The linker can comprise an aryl or heteroaryl moiety. The linker can be based on a phenyl ring. The linker may include functionalized moieties to facilitate attachment of a nucleophile (e.g., thiol, amino) from the peptide to the linker. Any electrophile may be used as part of the linker. Exemplary electrophiles include, but are not limited to, activated esters, activated amides, alkyl halides, aryl halides, acyl halides, and isothiocyanates.

[0301] The linker can be an amino acid or a plurality of amino acids (e.g., a peptide or protein). The linker can be a bond (e.g., a covalent bond), an organic molecule, group, polymer, or chemical moiety. The linker can be 5-100 amino acids in length, for example, 5, 6, 7, 8, 9, 10, 11, 12, 13, 14, 15, 16, 17, 18, 19, 20, 21, 22, 23, 24, 25, 26, 27, 28, 29, 30, 30-35, 35-40, 40-45, 45-50, 50-60, 60-70, 70-80, 80-90, 90-100, 100-110, 110-120, 120-130, 130-140, 140-150, or 150-200 amino acids in length. Longer or shorter linkers are also contemplated. A linker can comprise the amino acid sequence SGSETPGTSESATPES, which may also be referred to as the XTEN linker. A linker can comprise the amino acid sequence SGGS. A linker can comprise (SGGS)n, (GGGS)n, (GGGGS)n, (G)n, (EAAAK)n, (GGS)n, SGSETPGTSESATPES, or (XP)n motif, or a combination of any of these, wherein n is independently an integer between 1 and 30, and wherein X is any amino acid. In some instances, n is 1, 2, 3, 4, 5, 6, 7, 8, 9, 10, 11, 12, 13, 14, or 15. A linker can comprise SGSETPGTSESATPES, SGGSSGSETPGTSESATPESSGGS. A linker can comprise SGGSSGGSSGSETPGTSESATPESSGGSSGGS. A linker can comprise GGSGGSPGSPAGSPTSTEEGTSESATPESGPGTSTEPSEGSAPGSPAGSPTSTEEGTSTE PSEGSAPGTSTEPSEGSAPGTSESATPESGPGSEPATSGGSGGS. The linker can be 24 amino acids in length. The linker can comprise the amino acid sequence SGGSSGGSSGSETPGTSESATPES. The linker can be 40 amino acids in length. The linker can comprise the amino acid sequence SGGSSGGSSGSETPGTSESATPESSGGSSGGSSGGSSGGS. The linker can be 64 amino acids in length. The linker can comprise the amino acid sequence SGGSSGGSSGSETPGTSESATPESSGGSSGGSSGGSSGGSSGSETPGTSESATPESSGGSSG GS. The linker can be 92 amino acids in length. The linker can comprise the amino acid sequence PGSPAGSPTSTEEGTSESATPESGPGTSTEPSEGSAPGSPAGSPTSTEEGTSTEPSEGSAP GTSTEPSEGSAPGTSESATPESGPGSEPATS. It should be appreciated that any of the linkers provided herein may be used to link a first adenosine deaminase and a second adenosine deaminase; a deaminase (e.g., a first or a second adenosine deaminase) and a gene editor protein; a gene editor protein and an NLS; or a deaminase (e.g., a first or a second adenosine deaminase) and an NLS.

[0302] Various linker lengths and flexibilities between a deaminase (e.g., an engineered ecTadA) and a gene editor protein (e.g., a Cas9 domain), and/or between a first adenosine deaminase and a second adenosine deaminase can be employed (e.g., ranging from very flexible linkers of the form (GGGGS)n, (GGGGS)n, and (G)n to more rigid linkers of the form (EAAAK)n, (SGGS)n, and (XP)n) in order to achieve the optimal length for deaminase activity for the specific application. In some instances, n is any integer between 3 and 30. In some instances, n is 1, 2, 3, 4, 5, 6, 7, 8, 9, 10, 11, 12, 13, 14, or 15. The linker can comprise a (GGS)n motif, wherein n is 1, 3, or 7.

[0303] Additional linkers can be found in PCT Application Publication NO. WO2021/207712, which is hereby incorporated by reference in its entirety.

### ANGPTL3 Gene

[0304] The target gene for modification using the systems and methods disclosed herein can be a gene encoding ANGPTL3. ANGPTL3 has been associated with diseases and disorders such as, but not limited to, Arteriosclerosis, Atherosclerosis, Cardiovascular Diseases, Coronary heart disease, Diabetes, Diabetes Mellitus, Non-Insulin-Dependent Diabetes Mellitus, Fatty Liver, Hyperinsulinism, Hyperlipidemia, Hypertriglyceridemia, Hypobetalipoproteinemias, Inflammation, Insulin Resistance, Metabolic Diseases, Obesity, Malignant neoplasm of mouth, Lipid Metabolism Disorders, Lip and Oral Cavity Carcinoma, Dyslipidemias, Metabolic Syndrome X, Hypotriglyceridemia, Opitz trigonocephaly syndrome, Ischemic stroke, Hypertriglyceridemia result, Hypobetalipoproteinemia Familial 2, Familial hypobetalipoproteinemia, and Ischemic Cerebrovascular Accident. Editing the ANGPTL3 gene using any of the methods described herein may be used to treat, prevent and/or mitigate the symptoms of the diseases and disorders described herein.

[0305] The ANGPTL3 gene encodes the Angiopoietin-Like 3 protein, which is a determinant factor of high-density lipoprotein (HDL) level in human. It positively correlates with plasma triglyceride and HDL cholesterol. The activity of ANGPTL3 is expressed predominantly in the liver. ANGPTL3 is associated with Dyslipidemias. Dyslipidemias is a genetic disease characterized by elevated level of lipids in the blood that contributes to the development of clogged arteries (atherosclerosis). These lipids include plasma cholesterol, triglycerides, or high-density lipoprotein. Dyslipidemia increases the risk of heart attacks, stroke, or other circulatory concerns. Current management includes lifestyle changes such as exercise and dietary modifications as well as use of lipid-lowering drugs such as statins. Non-statin lipid-lowering drugs include bile acid sequestrants, cholesterol absorption inhibitors, drugs for homozygous familial hypercholesteremia, fibrates, nicotinic acid, omega-3 fatty acids and/or combination products. Treatment options usually depend on the specific lipid abnormality, although different lipid abnormalities often coexist. Treatment of children is more challenging as dietary changes may be difficult to implement and lipid-lowering therapies have not been proven effective.

[0306] ANGPTL3 is also known to cause hypobetalipoproteinemia. Hypobetalipoproteinemia is an inherited disease (autosomal recessive) that affects between 1 in 1000 and 1 in 3000 people worldwide. Common symptoms of hypobetalipoproteinemia include plasma levels of LDL cholesterol or apolipoprotein B below the 5th percentile which impairs the body's ability to absorb and transport fats and can lead to retinal degeneration, neuropathy, coagulopathy, or abnormal buildup of fats in the liver called hepatic steatosis. In severely affected patients, hepatic steatosis may progress to chronic liver disease (cirrhosis). Current treatment of hypobetalipoproteinemia includes severe restriction of long-chain fatty acids to 15 grams per day to improve fat absorption. In infants with hypobetalipoproteinemia, brief supplementation with medium-chain triglycerides may be effective but amount must be closely monitored to avoid liver toxicity. Another option for treating hypobetalipoproteinemia is administration high doses of vitamin E to prevent neurologic complications. Alternatively, vitamin A (10,000-25,000 IU/d) supplementation may be effective if an elevated prothrombin time suggests vitamin K depletion.

[0307] The target tissue for the systems and methods described herein can be liver tissue. The target gene can be ANGPTL3 which may also be referred to as Angiopoietin 5, ANGPT5, ANG-5, Angiopoietin-Like Protein 3, Angiopoietin-5, FHBL2, and ANL3. ANGPTL3 has a cytogenetic location of lp31.3 and the genomic coordinate are on Chromosome 1 on the forward strand at position 62,597,487-62,606,159.

[0308] Loss-of-function mutations that may be made in ANGPTL3 gene using the methods and systems described herein are also provided, including, but are not limited to premature stop codons, destabilizing mutations, altering splicing, etc.

[0309] The gene editing system of the present disclosure may reduce expression of functional ANGPTL3 protein encoded by the ANGPTL3 gene in the cell. The modification can reduce expression of functional ANGPTL3 protein encoded by at least 5%, at least 10%, at least 15%, at least 20%, at least 25%, at least 30%, at least 35%, at least 40%, at least 45%, at least 50%, at least 55%, at least 60%, at least 65%, at least 70%, at least 75%, at least 80%, at least 85%, at least 90%, at least 95%, at least 97%, at least 98%, at least 99%, at least 99.5%, at least 99.9%, or 100%. The modification can reduce expression of functional ANGPTL3 protein encoded by the ANGPTL3 gene in the cell by at least 2 fold, at least 3 fold, at least 4 fold, at least 5 fold, at least 10 fold, at least 20 fold, at least 25 fold, at least 30 fold, at least 40 fold, at least 50 fold, at least 60 fold, at least 70 fold, at least 80 fold, at least 90 fold, at least 100 fold, at least 200 fold, at least 300 fold, at least 400 fold, at least 500 fold, at least 600 fold, at least 700 fold, at least 800 fold, at least 900 fold, at least 1000 fold, at least 2000 fold, at least 3000 fold, at least 4000 fold, at least 5000 fold, at least 6000 fold, at least 7000 fold, at least 8000 fold, at least 9000 fold, or at least 10000 fold. The modification can abolish expression of functional ANGPTL3 protein encoded by the ANGPTL3 gene in the cell.

[0310] A splice site disruption generated by a gene editing system disclosed herein can result in the inclusion of intronic sequences in messenger RNA (mRNA) encoded by the ANGPTL3 gene. The splice site disruption can generate a nonsense, frameshift, or an in-frame indel mutation that result in premature stop codons or in insertion/deletion of amino acids that disrupt protein activity. The splice site disruption can generate exclusion of exonic sequences. The splice site disruption can generate exclusion of exonic sequences that results in nonsense, frameshift, or in-frame indel mutations in the ANGPTL3 transcript. Canonical splice donors comprise the DNA sequence GT on the sense strand, whereas canonical splice acceptors comprise the DNA sequence AG. Alteration of the sequence disrupts normal splicing. Splice donors can be disrupted by adenine base editing of the complementary base in the second position in the antisense strand (GT to GC), and splice acceptors can be disrupted by adenine base editing of the first position in the sense strand (AG to GG).

[0311] A gene editing system provided herein can affect an A●T to G●C alteration in a ANGPTL3 gene when contacted with the ANGPTL3 gene. The A●T to G●C alteration can be at a splice donor site of the ANGPTL3 gene. The A●T to G●C alteration can be at a splice acceptor site of the ANTPTL3 gene. The A●T to G●C alteration can result in an aberrant ANGPTL3 transcript encoded by the ANGPTL3 gene. The A●T to G●C alteration can result in a non-functional ANGPTL3 polypeptide encoded by the ANGPTL3 gene. The A●T to G●C alteration can be at a 5′ end of a splice donor site of an intron 6 of the ANGPLT3 gene.

[0312] The nucleotide sequence of human ANGPTL3 is provided, for example, in NG_028169.1, which is incorporated herein in its entirety. The protein sequence of human ANGPTL3 is provided, for example, AAD34156.1, which is incorporated herein in its entirety.

[0313] Mouse, rat, and monkey ANGPTL3 nucleic acid sequences have been deposited; see, e.g., Ensembl accession number ENSMUSG00000028553, ENSRNOG00000008638, and ENSMFAG00000007083 respectively, each of which sequences are incorporated herein its entirety.

[0314] The polypeptide and coding nucleic acid sequences of ANGPTL3 and of other members of the family of human origin and those of a number of animals are publicly available, e.g., from the NCBI website or ENSEMBL website. Examples include, but are not limited to the following sequences, each of which sequences are incorporated herein in their entireties:

[0315] NG_028169.1 Human angiopoietin like 3 (ANGPTL3), RefSeqGene on chromosome 1

(SEQ ID NO: 1)
AATGACAAACTGAAAAAATCTATTGTTTGTTATATATATAACAAAGAATTAGTATCC
ACAATATGTAAATAATTCCTAAAATTAGTCAGAAAGAGACAAACTTAAAAAGAGGG
TAACAAGGAGGGGAGCAAATTATGTACATAACCAGATGATTCGCAAAGACGGCAAC
AGAGATGGCCAGCAAAACAAACTAGATATATACTTGTCTATTAGATTTATCAACATT
TTTTGCCTTTTTCATTAAAAGCATTTGTAAAAGGATATAGGAAAAGAGGAACTCTCA
TATACTCCTGGCAGGGATGTAAATTGGTACAACCCTTTTGAAGGACAATCTGACAAA
AGCAATCGTAAGTTACAAGTCAACATCTATGAATGTATATGAAAATATTTATATACA
TACATCACCACCATAAAAGCATTTTCTATACATACTGTTTATAATTAGAAAATTGGA
AACAAATGATTAAAAGGGGGCTGATTAAATTAAGGTTCATCTATATAACAGGATTAT
GCAGCTATTAAAAAGGACGTGGTAACTCTATAGACATTCATAGGAAAATAAATTTTA
AAATACTAAGATCCTGAATGATATATATATCATGAGCTATTATACATAACAAGATCC
CACTTGTGTTATAAAAAATTATGTTTAGTCATTCAAAGGGTCTGGTATGATAGACCC
AAAATGTTAATAGAGTCGAGATTTTTATTTTTTATAGGTTTTTGAAATACCTGAATTT
TCACAATAAGTACTTTGCACATTAAAAATCTTAGCTGGGCATGGTGGCTCACGCTTG
TAATCCCAGCACTCTGGGAGGCCAAGGTAGGCAGATCACCTGAGGTCAGGAGTTCG
AGACCAGTCTGGCCAACATGGTGAAACCCCGTCTCTACTAAAAATACAAAAATTAG
CCAGGCTTGGTTGGGGGTGCCTGTAATTCCAGATACTCGGGAAGCTGAGACAGGAG
AATCGCTTGAACCCAGGAGGGGGAAGTTGCAGTGAGCTGAGATCACGACGCTGCAC
TCCAGCCTGGGCAACAAAGAGCAAAACTCCGTCTCAAAAATAAATAAAGAAAAAAT
CTTTACATGTCCAAAGATACGGCTGTTCAACTAAAAAATATATATGTATAAAACTTA
ACATGTTAATAGTGAACACACAAAACAGTAAGATAGATAAAATTATTCCTTCAAAG
CTCACTTAACCTCTGGATCTACACTGTCCAAAAAGACGGTCTAATGAGACAATTGAG
CACTTGATAGGTGAGTGGTTCTAACTGAGATATGTTCTCAGTATAAAACATACAATA
GGATCTTCCTATACAACATTAATTAAAAAACAAACTATTGTAGTTAAAAAGGAAAAA
ATTAGAGATACTATGTAAAAAAGAGCCAAAATACCTTGTATTTTATTTGAAAGACAT
ATCTCCATAAGATTACACAACCTCGTGTAGGATAAAGGACTTTGCTTTGCTTGGAAT
TTAAACAATTTAGGCTCTTAAATGTCCTAAAATTCTCTGTAGCTAAGAAATTTTTATA
TTGGTTCCTAGGAACTAGGAATCCTTAAATTAGGCCCTACATTTGCTTACAAGTTTAT
TTTCCTTGGCATAAAATTTTTTAGTTTTTACATTACTGGTTATATTTGATCAGGGTTCT
ATTTAAATAGGCACAAGTTCAAGCAAAGATCAGATTCTGCTTTTAGCAGTGTGTACT
CAGACAGGAAGTATTAAAAGGCAGGCAGAAAATCCTTTATAAAATTACTACTTTCA
ATGCATTTTCCCACGTTGAAATGCTTCTGCAGTTTATAATTAGGCAAATTACTTTAAT
TATAATCAATAATGCTGTTCAAATTACTATAAGAATTATACAGATATTTATACCAAG
AGACAATATACTAGAAACCAAGACTACGTGACCATTACCTCTACTCTGTCAGTGTTA
TTTGTGAGAAATTGCACAAATTTTGCAAAAAGTGTTAGTATCCTACTACAGTAGGAT
ATAATATAGAAGGAAATAATTTCATAAAGCCTGTCTTTGGTACTAGTGCTCAGTTAC
TTTCATTAACTAAAAAAGGGGCTACTCTTCAAATTCCCTTCTCTAAAAAGAATGTAC
TATATCAAAAGGGGGTAAACACTACTACGTATACATTCTGCACTTAGAAATCCCTAT
ATGTTGATTTTATCATTCTCTTATTCAATAAATATTGTTTCTACAATGTGTAAGGCATT
ACTGTACTAAAGCATTATAAGGAATATAAGTTAAAAACACATACAAATCTTGCCAAT
CAACAGCTTATAGTGTAATAGGGGAGAGAAGCTGGCCCATCTATATTCTCCCTCAAC
TAGCAAGTGGATGAAATATCAGGGTCAATAGTTATAAGCCACAAAAGCTGACAGCT
TAATTAAGAGAAGTTTTGAAATATGTATTTCATGACCAATAATTACAACTGTAACTTT
TCTATTTAAAGAAGGAGAAAATTTGAATTTCTTCTCTAGCTCAACATACACTTCTATA
ATTCCATTACATGAACCAGAGTAAAGGGTAAGATGGAAATGAAGAATATTTTCTTAC
CCTTTTGTGGTTCTATATTGGACACTTAAAAATCATACACAACCTAATCAAAAGATG
TAATTCTTTAAAAAGGTACGAGACCAAAATTCAGAAAATCTAGACTATAACAAAATT
TCTCAATTTACATTATCTTAATATGCAATTAATTTTCACCAGTAAAATACTATAGTAT
GGGTACAAATGCATTGATTAGTTCTAATTACAAAAATGGCTAATATATAATACTGTG
TAGTGTTTATGATACATCAGATAATGTTCTAAGTGCTCTGAAAATATAAACTTTTAAT
CTTTTATACGACCCTATAAAATAGGTGTTATTCTCACTGGAGAGATGAGAAAACAGG
GGTTCAGAGATGTGAAGTAATTTGACCAAAGGTCACAAAGCTGAAGAATATGAAAT
CCGGGATTCTGATTCAGGCAGTCTTATTCCAGAATCATGCTCTTAACCACTATGGAA
TACTGCCTCTACTGTAACTATTATACCCAAAACCCTTAATCCTAAGTCATCAAAAGG
AAGAGCCTCTATTTTACACAATGAAGAGGCATTTCTAAGAATAGAAATTTAGGGACG
AGCACAGTGGCTTACTCCTTTAATATCAGCACTTTGAGAGGCTGATATGGGAGGTTC
ACTTGAAGTCAGGAGTTCAAGGTCAGCTTGGGCAACATAGTGAAACACAGTCTCTAC
AAAATATTTAAAAATTAGCTGGGTGTGGTGGCATGCATCTATAGTCTCAGCTACTTG
GGAGACAGAGGGAGGAGGCTTGCTCGAGCCCAGGAGTTCGTGGCTATAGTGAGCTA
TGATCATGCCACTGCACTCCAGCCTGGACAACAGAGCAAGACCCTGTCTCTAAAAAA
GAAAAGAAATTTGGAAATGGTTTATTTTGTATTAACAATTTATAATTTACACTGAAA
TTTATTATGATAAAACTTTTCCCTGTGTTAAAAAGCTATTAACTTTATGAAAAATTTC
TTTTAGGTAAGGTTGATTATATATACCCACACACATACACAGGTTAAAAGTTAGTTT
CATGTGACATAATAACTAGCATTTTGAGCACTACCTGTTTGCCCAGCACTGTTCTAA
GTGCTCTACATGTATTATTGTTAAATTATCATAACACTATGAATTATGTACTATAATT
ACCCCAGCTTTACAGATGAGGAGACTAATCCATGGGGAGGTTAAGTAACTTGTCCAA
GGCCAGACAGCTAGAGCCGGCTTTTGGACCCACACCACAGTCTGACTCCAGCACCCA
TATTCTTAACAATTTCACCATATTAATATGTCAAGATTAAGCAGTTTTAAAGGATGCT
ATTTTCTCACAAATTTCTTAATATGAACACTCAATAAGAATAATCACTAATATAAGC
ATTTAGTATTTTTTTAACACTAAGTTGGAAGCATAGTGGAACATTTATTTTTAGAAAT
ATTATTAATTGGCTGGGCTCACGCTTGTAATCGGCTGGGCTCATGCCTGTAAATTTTG
GGAGGCCAAGGTAAAAGAATTGCTTGAGCCCAGTATTTCCAGACCAGCATGGGCAA
TACATTAAGACATCATCTTTAAAAAAAAAATGTTATTAATCTCCTCTTTTTGTTAAAT
GTATATTATCAAAATTGTTACTAAGCTAACAAACTTCAGAAAAACTTATGATGGGCA
AGCTGCTTGTGACATTGAAGGTATTTAAGATTCAATTCTAGTTTGGTCCTAGATGACC
ACATATCCATTGTTCCTTCAACGAGCACATGGTAAAGAGCCTAGAACACAGAGACA
CAGAACACAGTGGAGAAAAGGGAGTGAAATGTCTTTAATGACACTTACTATATATG
GGATTTTGTGACAATATACAAGGATGGTTAAGACATATAAGGTGATGCAAAAAAAC
ATATTAACAATTATAGTGACAAAAAATGAGGAGCATATAATTATACATTGATTTATA
CAGAGTACCAGAGGAACACAGCATTGAGAGCCGTAACACCACCTGAGGGAGTGGAG
AAAGGCTTCAGAGAGAAAGTGTTTTTTGGAATGGATCACTGTTTCCAAAAGAACTAA
AGTACAGTTTGAGAAATGCATACTTAATTCATTACTTTTTTCCCCTCAACTTTAATAA
TAAATTTACCCAACAAAAAAGTTTATTTTTGACTTGTAAATCTCTTAAAATCATAAAA
AAGTAAAATTAGCTTTTAAAAACAGGTAGTCACCATAGCATTGAATGTGTAGTTTAT
AATACAGCAAAGTTAAATACAATTTCAAATTACCTATTAAGTTAGTTGCTCATTTCTT
TGATTTCATTTAGCATTGATCTAACTCAATGTGGAAGAAGGTTACATTCGTGCAAGTT
AACACGGCTTAATGATTAACTATGTTCACCTACCAACCTTACCTTTTCTGGGCAAATA
TTGGTATATATAGAGTTAAGAAGTCTAGGTCTGCTTCCAGAAGAAAACAGTTCCACG
TTGCTTGAAATTGAAAATCAAGATAAAAATGTTCACAATTAAGCTCCTTCTTTTTATT
GTTCCTCTAGTTATTTCCTCCAGAATTGATCAAGACAATTCATCATTTGATTCTCTAT
CTCCAGAGCCAAAATCAAGATTTGCTATGTTAGACGATGTAAAAATTTTAGCCAATG
GCCTCCTTCAGTTGGGACATGGTCTTAAAGACTTTGTCCATAAGACGAAGGGCCAAA
TTAATGACATATTTCAAAAACTCAACATATTTGATCAGTCTTTTTATGATCTATCGCT
GCAAACCAGTGAAATCAAAGAAGAAGAAAAGGAACTGAGAAGAACTACATATAAA
CTACAAGTCAAAAATGAAGAGGTAAAGAATATGTCACTTGAACTCAACTCAAAACT
TGAAAGCCTCCTAGAAGAAAAAATTCTACTTCAACAAAAAGTGAAATATTTAGAAG
AGCAACTAACTAACTTAATTCAAAATCAACCTGAAACTCCAGAACACCCAGAAGTA
ACTTCACTTAAAGTAAGTAGAAAATAAAGAGGGTTCATGTTTATGTTTTCAATGTGG
ATCTTTTAAAAAAAATATTTCTAAGGCATGCCATTTGAAATACTTTGTTGCATTGTTG
AAATACTTTTTTTTCCAAGAAAAATAATCTCCAGAAAATAAAATTTCCTATTATAATT
TCAAGTTAGTTTTTTGTTTCCCTAATGTTATATATGAAAACACTGAAAATTTGCATTT
TATATGAAAATTACAAATCGGTTAAATTATACAATCTAGAACACTATGTCATTACAC
TATTGTAAATTACTGAAGGTAAGTAAAAAGTTAAAAAAAATTTAAAACTATTCTCCA
GTGTTTAAAACAGATTAAATAATACAGTAAATGGAAAAGATTTATTCATATGAAAAT
ATGCTGGGCTTTTTCTTTTAATTGAAGTTCAGAAAATCAAATTTTAGAGATAGTACAA
TTTAAATAAAATGTTAAGGACAAAAATATGTGCTATTTGAAAGAAGCATACAAGGG
GAAGGAATTGCCAATATTCATTTTTCAAATCCATTATTAGTTTAAAAATTTAGATTAT
GATAGTGTTACAGGAAATTAATAGAAAAGAAAGAGGAAAGCAACTTATAACCAACC
TACTCTCTATATCCAGACTTTTGTAGAAAAACAAGATAATAGCATCAAAGACCTTCT
CCAGACCGTGGAAGACCAATATAAACAATTAAACCAACAGCATAGTCAAATAAAAG
AAATAGAAAATCAGGTAAGTCAGTATTTTAATGGTATGTCCCATCTTTCACACAGGT
CTGTAAAAACACTGAATCCTAAAATTATTTACAAGCTTTAACTGGATCATGAGTAAA
ATTATCACATCAGCATAACTGTTAAAATTGCAGGCTCTGAAGCTAATAAACTACCTG
CATTTAAACCATGGCTCTAAAACTTTGTGTGACCTTGAATAAATTACTTCACCCCTTT
ATCTCTCAGTTTCCTCACATATACTACAAAGATAATAACAGAACTTATAGGATTATT
GTAAGAAAAAAAATTAATTCATAGCAGCCAATGTCATCTTACTAAAATTCAAATTAG
ATCATGTTTCTCTTTGCTCAAAACCACACAATAGCTTTCCATTTCACTCATATTGGCT
CTTTAGACCAAGATTACCCAACCCTTCGTCATCTCACTGACTTCACCTCCTCTACTCT
AGTTATTCTGACCGCTTTACCAGTATTCAAACACATCAAACATACTGCCACCTCAAA
GCCTTTGCCCTTGTTGTTTCCTCTAACTGGAACGCTCTTCTGCCCTGGTATCTACGTG
GCCCACTCTCTGATTTCCCTTAGGGTCGTTATCAAACAAAAAATTCCCAATGAAGAC
TTACAAGGTCACTTAACCAAAAATCACAACCGCCTGGTCCCATCCCTGAAAACTTCT
ACTTCCTTAGCTACTTTTCTCCTGCACACTCACCTTTATTTAACATAACATAAATTTTA
GTTATTTATCTCTTCTATTCCTGCACTAAAATGTAAGCTCTGTGAATACAGGGATTTT
TTCCATTATCTTCATATTTTCCATTATTTGTATATACTCCAGAATATAGAATACTGTAT
GGCACACAGTAGGCATTTCTGTTGAATTAATAAATGTAATGTCATATTCACACAGAA
GCGTGTGCTATGATTATTATTACTTGGATTACTAGAAATAGTGTGCCTCATAATTAAA
GGTCAACATTCAACAATGTAATTAATCTACAATGTAAACATCTGGTGAAGTGACAGA
GGGAAGCACTTGTTTAGAAAAAAGCTATGTCAGAATCCATGTATTCTAATATGCAGT
ACAATAGTTTAAAAATATTAATAATACTCTCAAACAGCTATTCAAGAGGATTCAAAA
AACATAATATAAACTCAGAGAAACTGGTAAACAAAATCATTTTCAAGAGATATAAA
ACAAATATTATTACCAATTTCCACTAAACAAACATAATGTTAGTAGTGCTGCTAAAA
GGTTTTTTATCAACTACTTTTGGTTTCCATACTTTCCTTCTTATGATGTTATTATTCTA
AATTCTTTTCAATTATATCTTTTACTATGATTAAATGAACCTGCTCCCCAAAGCAAAA
TGTTACTATAGTAATATACATTGTGTCTAAAAATAAAAATGTGTGAAGAAACCAAAA
CAATGAATTTCTGAGTTGGAAGAAGAGTTAGATCATTTAACTTTCTCATATTTAAATT
AAAAAAACAAAACTCTAAAAATTTAAGTAACTTTAAGATCACATAGTTACTTAGTAG
AAAAGAGTAATACCCAGCAAGCAAACTTTACAATAGATCCTTTTAAATAAGGTCCTA
GGAAATATCATTCATGCCAGCATCAAAAAACTAACACTAATAATGCAAGATATTATA
TATTCTGCTTTTCTTACTGTCAATGAGAAAAACTATCATTCAATAAATTGCAAACCCA
ACACACTTAAATAAAAATAAAATGTTACTGCTAAACTAACGATAAACTACTGAATAT
ATAGAAAGTAAGCAAACAAACTTGCCAACCTGCCAACATCTACAGATATGTTTACA
GGTCAAAAATTATCAAATTATCAAGAAAGCCTGGTTCAAATTATGTATTATGTCTTT
ATCACAGGTCTGAAGATCAGTAAGACCTAAAACTGAAAATTATTAAACTTAAAATCT
GAACAGAATATCAAATATATTTTATTCATATAAATAAAAGAATACATTACAATATTC
TAAGCAAAGCAGTCTCTACTTTTGGCCTTGCTCTGTTTTCCGACCAATGTCTGCTTTT
TTGCCTTGCTTTATTTTTTTATCTTATTAAATAATGTCCCTGATTAAATATTTTGAGAA
CAGGTAATCTGTACAATCTGAATAACACTGTTTATCTAAATATCAAACACCGTTATA
ACATTATGAACTGAAAGACAAACTGTACTTCTGACATCCTTACTCAGATTTCCCCTA
ATTGTATATTCAGTATCATTTTAAAAAACAGATTTATATTCTTTTATCAGCTCAGAAG
GACTAGTATTCAAGAACCCACAGAAATTTCTCTATCTTCCAAGCCAAGAGCACCAAG
AACTACTCCCTTTCTTCAGTTGAATGAAATAAGAAATGTAAAACATGATGGTAAGAC
ACTTTGGTGGGTTTCCTTCTTGAAGCTATTATTATCAAATTCCCTATTCTTAGGACTTG
TTCTAGACTAAAAGATAGTTAAGAGATATCCATCAAATACAATGTATCAACCTAAAC
TGGATGCTGGGGTTCTTTTTACACCCTATAAAAGACATACCTAAGACAATCAGAGAA
ATACAAATATGGACTTGATTATTAGATAATATAGAAGGTTTATTAATTTTCTTAGATG
TGATCATGGTATTGCAGTTTTAAAGGAGAACAATCTCCTGTTTAAGAGATACATGCT
GAAATATTTACGGAGTTAAAGGTCACTGGACTCCAGACTGGTGATAGAACAAGACT
CTGTCTCTAAAAAATAATTAATTTTTTAAAAGAAAATAGTTTGGTAAGATGATTCTTA
CATTCTTAAATAACACGCCATCTAAGAAAAATGCTTTAACATAAACATTACTGAAAA
AATGCTACATTTGCCACAACTTCATAAAATGTCAAGTGAAATCTCAAGCTCCAAAGA
TATTATTCCTATTACTAAATCTGATGTAATAACATTTTATTGATTCTAGGCATTCCTG
CTGAATGTACCACCATTTATAACAGAGGTGAACATACAAGTGGCATGTATGCCATCA
GACCCAGCAACTCTCAAGTTTTTCATGTCTACTGTGATGTTATATCAGGTAAAACCTG
TCTAAGGAGAATAGACAGTAGTTAGTTCAACTTACTCATTACGTATTAGGAAGATTA
ACCTGGTTATCATTGTTTTATACATATATATATGAAATATATATGAGTATTCGTATAA
ATATAATACTTTTACCTTGTTTATGTATTTACTCAATATTCTCCTTTTCCTCTAAAATA
ATCTGAAGTGACTATTATCAATAAGTTTACTATGCCAAAATTCATTAATTGCCTTTCA
CTTAACTTTTGGGACCATAATAAATAATAAAATGTATTGCCATAACATTAATAAACT
ACCTTACAAAACCACCAATTAAAATCAAACAAACAAAAAAGTGTTATTTACATCTGT
CAACATAAATCTACTAAAAATACATGATTTCATTCATTATATTCAGGTAGTCCATGG
ACATTAATTCAACATCGAATAGATGGATCACAAAACTTCAATGAAACGTGGGAGAA
CTACAAATATGGTTTTGGGAGGCTTGATGGTAAGGGGACTACATTCAATCATTCATT
CACTTGCTAATCTACAAATATTTACTGAGAACCTCTTATGGACCAGGTATTAGGAAA
AGTAGTAACGAACGAGAAGCAGTCTCAGCCTTCATATAATTTATTATCAAACAATTA
CACATTTGTTAGTAAATTACACTTATTACAACTGTTATTATTTGAATTATATTTATCA
CAATTACATGTCTGTTCTTAAATATACTTATCACAATTTAATTCCACGGCTTACAATG
ATCATAACTATAATTATTAAAGACAATTTTGATTAAATGTTATGTCATAAGTAGTAA
CTGTTACAAATAAGCTGTGAAAAGAACCACTCCTAGCATTAGTCACTCTATTCTCTC
ATTAACGTTTTACATATCAATTAATTGGAAGTTAAAAGGACCAGGAAACTCAGACAT
ACAGTATACATTTTAAAATTTCAATTATTTAAATATAATATATAGAATGTATGGCTTA
TAATGAATTAGTTAACTCAATGCAAATTATTCTATTTTGATTACAAATAGTAAAATA
AGCAAGATAAAATAACAGATGTTTAAAATCCAAAAAGCACATACAAAAATCCATGA
ATGATGTCTAAGTACTCACTTATAAAGTAGAAGACATTCATTATTATATCAAATTTTT
AAATGCTCAGTACTATTTGACCATTTAAAAATTTTGTATTCAAACTACCAGTGAAAG
CCCTACCTAGAAGGTATACTCAGTGATAAGTTTTGTAGCTCCAAATCTTCTAATAGT
GAGTGTAACCCCAAAATAAAAGGCTGACAGGTAAGTCGAGAATACTCACTTAATTC
TGGTAAGAAAGCAACCCATTTGTACTTGTATTTACCAGCAATCCTTAAAATGAAGCT
TCCTACTAACTCAATAGCAATAAGACAATAGTGAATGTTTAATGAAAACAGTATTTT
ATAAATACTTTAATAAAAAGGATTGTGATGAAGAACAATCTATTTATATTTGTTATTT
GTTTTTAATTCCAATAAAAATAATTTTTAAAATTACAGAAAAAAGTTATTAAGAACC
ATGCTTTTAAATTTAAAATGATTTTTTAAATTTATTCCTGTCTTTTTCTACAAAGAAA
GCATACATTAAGCAAATACCAAAGGCCAGGTTTACATTTGAAGAAAGTGACATTATT
ATTACTCAAGTCTCTAGGAATACTTAACACATCTCTTGACTGTATATGGATGTTAATA
AATAGCTGACAGTAAAGTTTATCCATATAAAGACTTGCAAATATTCCTCTACCAATG
ACGAGACTTTAAAATATCTATAATAATGTAACACATTTCACTGGTGAAACATGTCTT
GTCATATGCATTATAGAAAGGATAATCAGACTTTCAGTTATATTAATATTTTTAACAT
TTTTGTGCACATAGCTATCTTCAATAAAATTGTTTTAAAAGGTATTATTTTAAGATAC
ACTAAAATGATCAAGGGATTCAAGACTAAACAACTCAATTAGTTGCACCAATAAAA
AACACTTAAAAAAACTGTCAGTGTCCAACCTGTACTTAATAACTCACAGATTTTTAA
AACTTTTCTTTTCAGGAGAATTTTGGTTGGGCCTAGAGAAGATATACTCCATAGTGA
AGCAATCTAATTATGTTTTACGAATTGAGTTGGAAGACTGGAAAGACAACAAACATT
ATATTGAATATTCTTTTTACTTGGGAAATCACGAAACCAACTATACGCTACATCTAGT
TGCGATTACTGGCAATGTCCCCAATGCAATCCCGGAAAACAAAGATTTGGTGTTTTC
TACTTGGGATCACAAAGCAAAAGGACACTTCAACTGTCCAGAGGGTTATTCAGGTAT
CTTTTTCTGATACCAATACTTTATTTTCATATCTTCAAAGTATCTTCCCACATTATTAG
CTATTATCTGCAATGACAACTTTTAAAAATCCGAATCCCAAATAAGCGTTTTCTCTCT
AGACGAAAACCTCTTAACTATAATGAAAGTGTTCATTCTAGTTCAATCAGGTATTTT
ACCTCTAATCTTCCTCAGATTTTCTATTTTTTGGTAGTGTATAGATTATTTATACAGAT
TATTTAAAATTGGGACTTATACAGATTATTTAAAACTGGGATACATGCATCTAAAAC
ACTGTAATATTTATAAGAAAGGAAGATAAACTTACGGGGAAATACAGTAACAGTAA
CTACATACGAGTCTGTACCCATTAAATTGCATATCTATCTCCTTTAGGAGGCTGGTGG
TGGCATGATGAGTGTGGAGAAAACAACCTAAATGGTAAATATAACAAACCAAGAGC
AAAATCTAAGCCAGAGAGGAGAAGAGGATTATCTTGGAAGTCTCAAAATGGAAGGT
TATACTCTATAAAATCAACCAAAATGTTGATCCATCCAACAGATTCAGAAAGCTTTG
AATGAACTGAGGCAAATTTAAAAGGCAATAATTTAAACATTAACCTCATTCCAAGTT
AATGTGGTCTAATAATCTGGTATTAAATCCTTAAGAGAAAGCTTGAGAAATAGATTT
TTTTTATCTTAAAGTCACTGTCTATTTAAGATTAAACATACAATCACATAACCTTAAA
GAATACCGTTTACATTTCTCAATCAAAATTCTTATAATACTATTTGTTTTAAATTTTGT
GATGTGGGAATCAATTTTAGATGGTCACAATCTAGATTATAATCAATAGGTGAACTT
ATTAAATAACTTTTCTAAATAAAAAATTTAGAGACTTTTATTTTAAAAGGCATCATAT
GAGCTAATATCACAACTTTCCCAGTTTAAAAAACTAGTACTCTTGTTAAAACTCTAA
ACTTGACTAAATACAGAGGACTGGTAATTGTACAGTTCTTAAATGTTGTAGTATTAA
TTTCAAAACTAAAAATCGTCAGCACAGAGTATGTGTAAAAATCTGTAATACAAATTT
TTAAACTGATGCTTCATTTTGCTACAAAATAATTTGGAGTAAATGTTTGATATGATTT
ATTTATGAAACCTAATGAAGCAGAATTAAATACTGTATTAAAATAAGTTCGCTGTCT
TTAAACAAATGGAGATGACTACTAAGTCACATTGACTTTAACATGAGGTATCACTAT
ACCTTATTTGTTAAAATATATACTGTATACATTTTATATATTTTAACACTTAATACTAT
GAAAACAAATAATTGTAAAGGAATCTTGTCAGATTACAGTAAGAATGAACATATTTG
TGGCATCGAGTTAAAGTTTATATTTCCCCTAAATATGCTGTGATTCTAATACATTCGT
GTAGGTTTTCAAGTAGAAATAAACCTCGTAACAAGTTACTGAACGTTTAAACAGCCT
GACAAGCATGTATATATGTTTAAAATTCAATAAACAAAGACCCAGTCCCTAAATTAT
AGAAATTTAAATTATTCTTGCATGTTTATCGACATCACAACAGATCCCTAAATCCCTA
AATCCCTAAAGATTAGATACAAATTTTTTACCACAGTATCACTTGTCAGAATTTATTT
TTAAATATGATTTTTTAAAACTGCCAGTAAGAAATTTTAAATTAAACCCATTTGTTAA
AGGATATAGTGCCCAAGTTATATGGTGACCTACCTTTGTCAATACTTAGCATTATGTA
TTTCAAATTATCCAATATACATGTCATATATATTTTTATATGTCACATATATAAAAGA
TATGTATGATCTATGTGAATCCTAAGTAAATATTTTGTTCCAGAAAAGTACAAAATA
ATAAAGGTAAAAATAATCTATAATTTTCAGGACCACAGACTAAGCTGTCGAAATTAA
CGCTGATTTTTTTAGGGCCAGAATACCAAAATGGCTCCTCTCTTCCCCCAAAATTGG
ACAATTTCAAATGCAAAATAATTCATTATTTAATATATGAGTTGCTTCCTCTATTTGG
TTTCCTTAAAAAAAAAAAAAACTCTCATAGGACATGTTTCATTTTGTTCCTTTCAGGA
GTAGTAAATTAGACGTTTTCCCCATATAAAGCTTTTTTCTACCAGAAAGATACTTCTG
GTAGAAGAAGAGAAAGGAGCTCTTTATGGTTCACACGACTGTCTCCTGTCCTAACTA
CTTTGCTTAAAGTGCTCAAATTCCATCACTACTCACAGTTGTCTAATCTAAGTCTAAT
CCCCTTTGATCTCTCAGACTACCTTCCCTTTTATCTCTCTACTACTTAATAATAAGAAT
ATCTTTTTTTCAAACTTGACCTTCATTTTGCTTTCACAATACTATACTCTCCATGGATT
ATCCCTTATCTGAATCCATCTTTATAACCCTATTCCTTTCTCATATTTAGTACTGTGGG
CCAATGGACAACCTTCAATCATCTTTTCTACACTGACCCTCAGACATTCTATCTGCTC
TCACGGACTCCTTTATTTACCATGAATAAAGTTCCAAAATCTACATATTCATCCCAAG
TCTCTTTCCAGTTCCCCTTCTTACATTGCCTATTTGCCATTTCTCCCTTCAATACCCTA
TACTTCACTCAAATTCAACATACCAAAAATAAAAGGCCAGGCACGGTGGCTCACAC
CTGTAATCCCAGGACTTTGGGAGGCTGAGGCAGGTGGATCACCTGAGGTCAGGAGT
CTGACCAGCCTGACCAATATGGTGAAACCCCGTCTCTACCTAAAATACAAAAATTAG
CCAGGCGTGGTGGCATGTGCCTACAGTCCCAGCTACTCAAGAGGCTGAGACAGGAG
AATCGCTTGAACCCAGGAGGCGGAGGTTGCAGTGAGCTGAGATCACACCAATGCAC
TGGGTGACAGAACAAGACTGACTCAAAAAAAAATAAATAACAAATTCCCCAGCCCC
TTACTGCTACTGCTATCCCTTTCTACCCACCTTTCCCTCCTTTATACTCTTTCACACCA
TCTTCCTCACTTCTTTATATCCATTAATATGACCAGCATGTTCCCAGTCACAGAAGCC
TGGAACCCGGAAGACATCTCTGGCTTTTCACTCAACTTTGTAAACTACCTCTTTTGTA
TCATAAGCCACCAAGTTCAATACAATCTTCTCTTGAAACGTCTCTTAATCTTATAAGC
TTTCTTCCCCAAAGACTGTCTTTAACTTCAGTGCTAGATTATATAAGT
AAD34156.1 human angiopoietin-related protein 3
(SEQ ID NO: 2)
MFTIKLLLFIVPLVISSRIDQDNSSFDSLSPEPKSRFAMLDDVKILANGLLQLGHGLKDFV
HKTKGQINDIFQKLNIFDQSFYDLSLQTSEIKEEEKELRRTTYKLQVKNEEVKNMSLELN
SKLESLLEEKILLQQKVKYLEEQLTNLIQNQPETPEHPEVTSLKTFVEKQDNSIKDLLQTV
EDQYKQLNQQHSQIKEIENQLRRTSIQEPTEISLSSKPRAPRTTPFLQLNEIRNVKHDGIPA
ECTTIYNRGEHTSGMYAIRPSNSQVFHVYCDVISGSPWTLIQHRIDGSQNFNETWENYKY
GFGRLDGEFWLGLEKIYSIVKQSNYVLRIELEDWKDNKHYIEYSFYLGNHETNYTLHLV
AITGNVPNAIPENKDLVFSTWDHKAKGHFNCPEGYSGGWWWHDECGENNLNGKYNKP
RAKSKPERRRGLSWKSQNGRLYSIKSTKMLIHPTDSESFE

### Proprotein Convertase Subtilisin-Kexin Type 9 (PCSK9)

[0316] The target gene for modification using the systems and methods disclosed herein can be a gene encoding PCSK9. Proprotein convertase subtilisin-kexin type 9 (PCSK9), also known as neural apoptosis-regulated convertase 1 (NARC-I), is a proteinase K-like subtilase identified as the 9th member of the secretory subtilase family. “Proprotein convertase subtilisin/kexin type 9 (PCSK9)” refers to an enzyme encoded by the PCSK9 gene. PCSK9 binds to the receptor for low-density lipoprotein (LDL) particles. In the liver, the LDL receptor removes LDL particles from the blood through the endocytosis pathway. When PCSK9 binds to the LDL receptor, the receptor is channeled towards the lysosomal pathway and broken down by proteolytic enzymes, limiting the number of times that a given LDL receptor is able to uptake LDL particles from the blood. Thus, blocking PCSK9 activity may lead to more LDL receptors being recycled and present on the surface of the liver cells, and will remove more LDL cholesterol from the blood.

[0317] Therefore, blocking PCSK9 can lower blood cholesterol levels. PCSK9 orthologs are found across many species. PCSK9 is inactive when first synthesized, a pre-pro enzyme, because a section of the peptide chain blocks its activity; proprotein convertases remove that section to activate the enzyme. Pro-PCSK9 is a secreted, globular, serine protease capable of proteolytic auto-processing of its N-terminal pro-domain into a potent endogenous inhibitor of PCSK9, which blocks its catalytic site. PCSK9's role in cholesterol homeostasis has been exploited medically. Drugs that block PCSK9 can lower the blood level of low-density lipoprotein cholesterol (LDL-C). The first two PCSK9 inhibitors, alirocumab and evolocumab, were approved by the U.S. Food and Drug Administration in 2015 for lowering cholesterol where statins and other drugs were insufficient.

[0318] The human gene for PCSK9 localizes to human chromosome Ip33-p34.3. PCSK9 is expressed in cells capable of proliferation and differentiation including, for example, hepatocytes, kidney mesenchymal cells, intestinal ileum, and colon epithelia as well as embryonic brain telencephalon neurons. See, e.g., Seidah et al., 2003 PNAS 100:928-933, which is incorporated herein by reference.

[0319] Original synthesis of PCSK9 is in the form of an inactive enzyme precursor, or zymogen, of 72-kDa, which undergoes autocatalytic, intramolecular processing in the endoplasmic reticulum (ER) to activate its functionality. This internal processing event has been reported to occur at the SSVFAQ jSIP motif, and has been reported as a requirement of exit from the ER. “j” indicates cleavage site. See, Benjannet et al., 2004 J. Biol. Chem. 279:48865-48875, and Seidah et al, 2003 PNAS 100:928-933, each of which are incorporated herein by reference. The cleaved protein is then secreted. The cleaved peptide remains associated with the activated and secreted enzyme.

[0320] The gene sequence for human PCSK9 is ˜22-kb long with 12 exons encoding a 692 amino acid protein. The protein sequence of human PCSK9 can be found, for example, at Deposit No. NP_777596.2, which sequence is incorporated herein in its entirety. Human, mouse and rat PCSK9 nucleic acid sequences have been deposited; see, e.g., GenBank Accession Nos.: AX127530 (also AX207686), AX207688, and AX207690, respectively, each of which sequence is incorporated herein in its entirety. The gene sequence of Macaca fascicularis can be found publically, for example, NCBI Gene ID: 102142788, which sequence is incorporated herein in their entirety. Macaca fascicularis proprotein convertase subtilisin/kexin type 9 isoform X2 sequence can be found publically, for example, at NCBI Reference Sequence: XP_005543317.1, which sequence is incorporated herein in its entirety.

[0321] The translated protein contains a signal peptide in the NH2-terminus, and in cells and tissues an about 74 kDa zymogen (precursor) form of the full-length protein is found in the endoplasmic reticulum. During initial processing in the cell, the about 14 kDa prodomain peptide is autocatalytically cleaved to yield a mature about 60 kDa protein containing the catalytic domain and a C-terminal domain often referred to as the cysteine-histidine rich domain (CHRD). This about 60 kDa form of PCSK9 is secreted from liver cells. The secreted form of PCSK9 appears to be the physiologically active species, although an intracellular functional role of the about 60 kDa form has not been ruled out.

[0322] Numerous PCSK9 variants are disclosed and/or claimed in several patent publications including, but not limited to the following: PCT Publication Nos. WO2001031007, WO2001057081, WO2002014358, WO2001098468, WO2002102993, WO2002102994, WO2002046383, WO2002090526, WO2001077137, and WO2001034768; US Publication Nos. US 2004/0009553 and US 2003/0119038, and European Publication Nos. EP 1 440 981, EP 1 067 182, and EP 1 471 152, each of which are incorporated herein by reference.

[0323] Several mutant forms of PCSK9 are well characterized, including S 127R, N157K, F216L, R218S, and D374Y, with S 127R, F216L, and D374Y being linked to autosomal dominant hypercholesterolemia (ADH). Benjannet et al. (J. Biol. Chem., 279(47):48865-48875 (2004)) demonstrated that the S 127R and D374Y mutations result in a significant decrease in the level of pro-PCSK9 processed in the ER to form the active secreted zymogen. As a consequence, it is believed that wild-type PCSK9 increases the turnover rate of the LDL receptor causing inhibition of LDL clearance (Maxwell et al, PNAS, 102(6):2069-2074 (2005); Benjannet et al, and Lalanne et al), while PCSK9 autosomal dominant mutations result in increased levels of LDLR, increased clearance of circulating LDL, and a corresponding decrease in plasma cholesterol levels. See, Rashid et al, PNAS, 102(15):5374-5379 (2005); Abifadel et al, 2003 Nature Genetics 34: 154-156; Timms et al, 2004 Hum. Genet. 114:349-353; and Leren, 2004 Clin. Genet. 65:419-422, each of which are incorporated herein by reference.

[0324] A later-published study on the S127R mutation of Abifadel et al, reported that patients carrying such a mutation exhibited higher total cholesterol and apoB 100 in the plasma attributed to (1) an overproduction of apoB 100-containing lipoproteins, such as low density lipoprotein (LDL), very low density lipoprotein (VLDL) and intermediate density lipoprotein (IDL), and (2) an associated reduction in clearance or conversion of said lipoproteins. Together, the studies referenced above evidence the fact that PCSK9 plays a role in the regulation of LDL production. Expression or upregulation of PCSK9 is associated with increased plasma levels of LDL cholesterol, and inhibition or the lack of expression of PCSK9 is associated with low LDL cholesterol plasma levels. Significantly, lower levels of LDL cholesterol associated with sequence variations in PCSK9 have conferred protection against coronary heart disease; Cohen et al, 2006 N. Engl. J. Med. 354: 1264-1272.

[0325] Lalanne et al. demonstrated that LDL catabolism was impaired and apolipoprotein B-containing lipoprotein synthesis was enhanced in two patients harboring S 127R mutations in PCSK9 (J. Lipid Research, 46: 1312-1319 (2005)). Sun et al. also provided evidence that mutant forms of PCSK9 are also the cause of unusually severe dominant hypercholesterolaemia as a consequence of its effect of increasing apolipoprotein B secretion (Sun et al, Hum. Mol. Genet, 14(9): 1161-1169 (2005)). These results were consistent with earlier results which demonstrated adenovirus-mediated overexpression of PCSK9 in mice results in severe hypercholesteromia due to drastic decreases in the amount of LDL receptor Dubuc et al., Thromb. Vase. Biol., 24: 1454-1459 (2004), in addition to results demonstrating mutant forms of PCSK9 also reduce the level of LDL receptor (Park et al., J. Biol. Chem., 279:50630-50638 (2004). The overexpression of PCSK9 in cell lines, including liver-derived cells, and in livers of mice in vivo, results in a pronounced reduction in LDLR protein levels and LDLR functional activity without changes in LDLR mRNA level (Maxwell et al., Proc. Nat. Amer. Set, 101:7100-7105 (2004); Benjannet S. et al, J. Bio. Chem. 279: 48865-48875 (2004)).

[0326] Various therapeutic approaches to the inhibition of PSCK9 have been proposed, including: inhibition of PSCK9 synthesis by gene silencing agents, e.g., RNAi; inhibition of PCSK9 binding to LDLR by monoclonal antibodies, small peptides or adnectins; and inhibition of PCSK9 autocatalytic processing by small molecule inhibitors. These strategies have been described in Hedrick et al., Curr Opin Investig Drugs 2009; 10:938-46; Hooper et al, Expert Opin Biol Ther, 2013; 13:429-35; Rhainds et al, Clin Lipid, 2012; 7:621-40; Seidah et al, Expert Opin Ther Targets 2009; 13:19-28; and Seidah et al, Nat Rev Drug Discov 2012; 11:367-83, each of which are incorporated herein by reference.

[0327] In some embodiments, the loss of function mutation induced in PCSK9 e.g., G106R, L253F, A443T, R93C, etc. In some embodiments, the loss-of-function mutation is engineered (i.e., not naturally occurring), e.g., G24D, S47F, R46H, S 153N, H193Y, etc.

[0328] PCSK9 variants that can be useful in the present disclosure are loss-of-function variants that may boost LDL receptor-mediated clearance of LDL cholesterol, alone or in combination with other genes involved in the pathway, e.g., APOC3, LDL-R, or Idol. In some embodiments, the PCSK9 loss-of-function variants produced using the methods of the present disclosure express efficiently in a cell. In some embodiments, the PCKS9 loss-of-function variants produced using the methods of the present disclosure is activated and exported to engage the clathrin-coated pits from unmodified cells in a paracrine mechanism, thus competing with the wild-type PCSK9 protein. In some embodiments, the PCSK9 loss-of-function variant comprises mutations in residues in the LDL-R bonding region that make direct contact with the LDL-R protein. In some embodiments, the residues in the LDL-R bonding region that make direct contact with the LDL-R protein are selected from the group consisting of R194, R237, F379, S372, D374, D375, D378, R46, R237, and A443.

[0329] As described herein, a loss-of-function PCSK9 variant, may have reduced activity compared to a wild type PCSK9 protein. PCSK9 activity refers to any known biological activity of the PCSK9 protein in the art. For example, in some embodiments, PCSK9 activity refers to its protease activity. In some embodiments, PCSK9 activity refers to its ability to be secreted through the cellular secretory pathway. In some embodiments, PCSK9 activity refers to its ability to act as a protein-binding adaptor in clathrin-coated vesicles. In some embodiments, PCSK9 activity refers to its ability to interact with LDL receptor. In some embodiments, PCSK9 activity refers to its ability to prevent LDL receptor recycling. These examples are not meant to be limiting.

[0330] In some embodiments, the activity of a loss-of-function PCSK9 variant may be reduced by at least 20%, at least 30%, at least 40%, at least 50%, at least 60%, at least 70%, at least 80%, at least 90%, at least 99%, or more. In some embodiments, the loss-of-function PCSK9 variant has no more than 50%, no more than 40%, no more than 30%, no more than 20%, no more than 10%, no more than 5%, no more than 1% or less activity compared to a wild type PCSK9 protein. Non-limiting, exemplary assays for determining PCSK9 activity have been described in the art, e.g., in US Patent Application Publication US20120082680, which are incorporated herein by reference.

[0331] In some embodiments, cellular PCSK9 activity may be reduced by reducing the level of properly folded and active PCSK9 protein. Introducing destabilizing mutations into the wild type PCSK9 protein may cause misfolding or deactivation of the protein. A PCSK9 variant comprising one or more destabilizing mutations described herein may have reduced activity compared to the wild type PCSK9 protein. For example, the activity of a PCSK9 variant comprising one or more destabilizing mutations described herein may be reduced by at least about 20%, at least about 30%, at least about 40%, at least about 50%, at least about 60%, at least about 70%, at least about 80%, at least about 90%, at least about 95%, at least about 99%, or more.

[0332] In some embodiments, the methods and composition disclosed herein reduce or abolish expression of protein encoded by a target gene and/or function thereof. For example, the methods and composition disclosed herein reduces expression and/or function of PCSK9 protein encoded by the PCSK9 gene by at least 3-fold, at least 4-fold, at least 5-fold, at least 6-fold, at least 7-fold, at least 8-fold, at least 9-fold, or at least 10-fold relative to a control. For example, the methods and composition disclosed herein reduces expression and/or function of APOC3 protein encoded by the APOC3 gene by at least 3-fold, at least 4-fold, at least 5-fold, at least 6-fold, at least 7-fold, at least 8-fold, at least 9-fold, or at least 10-fold relative to a control. For example, the methods and composition disclosed herein reduces expression and/or function of ANGPTL3 protein encoded by the ANGPTL3 gene by at least 3-fold, at least 4-fold, at least 5-fold, at least 6-fold, at least 7-fold, at least 8-fold, at least 9-fold, or at least 10-fold relative to a control.

[0333] In some embodiments, the gene modification methods and compositions disclosed herein reduces expression of functional PCSK9 protein encoded by the PCSK9 gene in the cell by at least 5%, at least 10%, at least 15%, at least 20%, at least 25%, at least 30%, at least 35%, at least 40%, at least 45%, at least 50%, at least 55%, at least 60%, at least 65%, at least 70%, at least 75%, at least 80%, at least 85%, at least 90%, at least 95%, at least 97%, at least 98%, at least 99%, at least 99.5%, at least 99.9%, or 100%. In some embodiments, the modification reduces expression of functional PCSK9 protein encoded by the PCSK9 gene in the cell by at least 2 fold, at least 3 fold, at least 4 fold, at least 5 fold, at least 10 fold, at least 20 fold, at least 25 fold, at least 30 fold, at least 40 fold, at least 50 fold, at least 60 fold, at least 70 fold, at least 80 fold, at least 90 fold, at least 100 fold, at least 200 fold, at least 300 fold, at least 400 fold, at least 500 fold, at least 600 fold, at least 700 fold, at least 800 fold, at least 900 fold, at least 1000 fold, at least 2000 fold, at least 3000 fold, at least 4000 fold, at least 5000 fold, at least 6000 fold, at least 7000 fold, at least 8000 fold, at least 9000 fold, or at least 10000 fold. In some embodiments, the modification abolishes expression of functional PCSK9 protein encoded by the PCSK9 gene in the cell.

[0334] Some aspects of the present disclosure provide strategies of reducing cellular PCSK9 activity via preventing PCSK9 mRNA maturation and production. In some embodiments, such strategies involve alterations of splicing sites in the PCSK9 gene. Altered splicing site may lead to altered splicing and maturation of the PCSK9 mRNA. For example, in some embodiments, an altered splicing site may lead to the skipping of an exon, in turn leading to a truncated protein product or an altered reading frame. In some embodiments, an altered splicing site may lead to translation of an intron sequence and premature translation termination when an in frame stop codon is encountered by the translating ribosome in the intron. In some embodiments, a start codon is edited and protein translation initiates at the next ATG codon, which may not be in the correct coding frame.

[0335] The splicing sites typically comprises an intron donor site, a Lariat branch point, and an intron acceptor site. The mechanism of splicing is familiar to those skilled in the art. As a non-limiting example, the intron donor site has a consensus sequence of GGGTRAGT, and the C bases paired with the G bases in the intron donor site consensus sequence may be targeted by the methods and compositions described herein, thereby altering the intron donor site. The Lariat branch point also has consensus sequences, e.g., YTRAC, wherein Y is a pyrimidine and R is a purine. The C base in the Lariat branch point consensus sequence may be targeted by the nucleobase editors described herein, leading to the skipping of the following exon. The intron acceptor site has a consensus sequence of YNCAGG, wherein Y is a pyrimidine and N is any nucleotide. The C base of the consensus sequence of the intron acceptor site, and the C base paired with the G bases in the consensus sequence of the intron acceptor site may be targeted by the nucleobase editors described herein, thereby altering the intron acceptor site, in turn leading the skipping of an exon. As described herein, gene sequence for human PCSK9 is −22-kb long and contains 12 exons and 11 introns. Each of the exon-intron junction may be altered to disrupt the processing and maturation of the PCSK9 mRNA.

[0336] In some embodiments, a splice site disruption generated by a base editor system disclosed herein can result in the inclusion of intronic sequences in messenger RNA (mRNA) encoded by the PCSK9 gene. In some embodiments, the splice site disruption generates a nonsense, frameshift, or an in-frame indel mutation that result in premature stop codons or in insertion/deletion of amino acids that disrupt protein activity. In some embodiments, the splice site disruption generates exclusion of exonic sequences. In some embodiments, the splice site disruption generates exclusion of exonic sequences that results in nonsense, frameshift, or in-frame indel mutations in the PCSK9 transcript. Canonical splice donors comprise the DNA sequence GT on the sense strand, whereas canonical splice acceptors comprise the DNA sequence AG. Alteration of the sequence disrupts normal splicing. Splice donors can be disrupted by adenine base editing of the complementary base in the second position in the antisense strand (GT to GC), and splice acceptors can be disrupted by adenine base editing of the first position in the sense strand (AG to GG).

[0337] Further, the present disclosure also contemplates the use of destabilizing mutations to counteract the effect of gain-of-function PCSK9 variant. Gain-of-function PCSK9 variants (e.g., the gain-of-function variants have been described in the art and are found to be associated with hypercholesterolemia (e.g., in Peterson et al., J Lipid Res. 2008 June; 49(6): 1152-1156; Benjannet et al., J Biol Chem. 2012 Sep. 28; 287(40):33745-55; Abifadel et al, Atherosclerosis. 2012 August; 223(2):394-400; and Cameron et al, Hum. Mol. Genet. (1 May 2006) 15(9): 1551-1558, each of which is incorporated herein by reference). Introducing destabilizing mutations into these gain-of-function PCSK9 variants may cause misfolding and deactivation of these gain-of-function variants, thereby counteracting the hyper-activity caused by the gain-of-function mutation. Further, gain-of-function mutations in several other key factors in the LDL-R mediated cholesterol clearance pathway, e.g., LDL-R, APOB, or APOC, have also been described in the art. Thus, making destabilizing mutations in these factors to counteract the deleterious effect of the gain-of-function mutation using the compositions and methods described herein, is also within the scope of the present disclosure. As such, the present disclosure further provides mutations that cause misfolding of PCSK9 protein or structurally destabilization of PCSK9 protein.

[0338] The polypeptide and coding nucleic acid sequences of PCSK9 and of other members of the family of human origin and those of a number of animals are publicly available, e.g., from the NCBI website or ENSEMBL website. Examples include, but are not limited to the following sequences, each of which sequences are incorporated herein in their entireties;

Wild Type PCSK9 Gene (NG_009061.1), Homo sapiens proprotein convertase
subtilisin/kexin type 9 (PCSK9), RefSeqGene (LRG_275) on chromosome 1
(SEQ ID NO: 755)
GTCCGATGGGGCTCTGGTGGCGTGATCTGCGCGCCCCAGGCGTCAAGCACCCACACC
CTAGAAGGTTTCCGCAGCGACGTCGAGGCGCTCATGGTTGCAGGCGGGCGCCGCCG
TTCAGTTCAGGGTCTGAGCCTGGAGGAGTGAGCCAGGCAGTGAGACTGGCTCGGGC
GGGCCGGGACGCGTCGTTGCAGCAGCGGCTCCCAGCTCCCAGCCAGGATTCCGCGC
GCCCCTTCACGCGCCCTGCTCCTGAACTTCAGCTCCTGCACAGTCCTCCCCACCGCAA
GGCTCAAGGCGCCGCCGGCGTGGACCGCGCACGGCCTCTAGGTCTCCTCGCCAGGA
CAGCAACCTCTCCCCTGGCCCTCATGGGCACCGTCAGCTCCAGGCGGTCCTGGTGGC
CGCTGCCACTGCTGCTGCTGCTGCTGCTGCTCCTGGGTCCCGCGGGCGCCCGTGCGC
AGGAGGACGAGGACGGCGACTACGAGGAGCTGGTGCTAGCCTTGCGTTCCGAGGAG
GACGGCCTGGCCGAAGCACCCGAGCACGGAACCACAGCCACCTTCCACCGCTGCGC
CAAGGTGCGGGTGTAGGGATGGGAGGCCGGGGCGAACCCGCAGCCGGGACGGTGC
GGTGCTGTTTCCTCTCGGGCCTCAGTTTCCCCCCATGTAAGAGAGGAAGTGGAGTGC
AGGTCGCCGAGGGCTCTTCGCTTGGCACGATCTTGGGGACTGCAGGCAAGGCGGCG
GGGGAGGACGGGTAGTGGGGAGCACGGTGGAGAGCGGGGACGGCCGGCTCTTTGG
GGACTTGCTGGGGCGTGCGGCTGCGCTATTCAGTGGGAAGGTTCGCGGGGTTGGGA
GACCCGGAGGCCGAGGAAGGGCGAGCAGAGCACTGCCAGGATATCCTGCCCAGATT
TCCCAGTTTCTGCCTCGCCGCGGCACAGGTGGGTGAAGGAGTGAATGCCTGGAACGT
ACTGGGAACTGCACCAGGCACAGAGAAAGCGGGCTTGCCATTATAGTGGGTTCCGA
TTTGGTTTGGAAAACATGGGCAGCGGAGGGTGGAGGGCCTGGAGAGAAGGCCCTAC
CCGAGACAGGGGGGGGGTGGGAAGGACGGCAGATGCTGGGAGCACGAGGCAATTT
CTTTATGACACAGAACTCATGCTCTAGTATTCCATCTGTTTCAGCCGAAGAAAAGAA
CCAGCTGAAGGGGCAGGGGAGAAGGGGCGGAGGTATTCTCGAGGCCCATTGGCGTC
CTTTAGGACTCAGGCAGGGAAGGGCCCTTGGTGCTCTGGAGCCGGAGGTGGTGCGC
CTGGTACTGGGACCCCGGAGCTGAGCCCGGCGCCTCAGCCCACCTGGCTGTCTGCCG
ACCGTGTGCGGGGCGAGTTTGCTCAACAACTCTGCCAGCTTCTGGCCCTCAGGCTGT
GGGAAGCTTCTTCCCGGGGCGAGACCACTAGCTTTTTCTAAGTATTACCAGCCCAGG
ACTTGGCTGAGGTTCTGTGTCCCCCAGCTTGGAGTCAGATGTGGGGTTGAATCTTGG
CTTCCTCTCACTAGCTGTGGTGCTTGACAAGTCACTTATCCTTGAGCCTCCATTGCCT
AATCTTTAAAAGGGAGGTGACAATCGTCCCTACGGCTCAGTGGCAGCAGATGGGGA
GATGAAGGGAAAGTTCTGTTGACCATGAGTGAACTTACAATGCAAGCCCCGGGGGG
ATCACTTGCAGTTTTGTCCCTGTCTGCAGTGTGACCTGTTGGTGACATTGTCTTTGCT
CCAAACCACAGCTCCTGGGGCAGAGGGGAAAATTCTGCCACTCACAGCTGCCTGCC
CACGCTTCTGTCTGAGTGTGCTGGGTGGCAGGATGGCAAGTCCTTACTCAGCTCAGT
ATAGCCCTCTTCCTTGTTCCCTGAGCCTTTGACTTTCTCGAGGGATGTTGTGGGGTTG
TGGCCAGGATAAGAAAGGGCATTTCAAGTTACCACTGCTCCAAAACAACTGTTCTGG
AAATAGTGAGTACCCCATCCTGAGAGGTGAGTAAGCAGAGGCTGTATGACCACCTG
AACCAAGCCCTTGAGGATGTTTCTTCTCTGGTGGAAGTTTGGAACAGGAGCCTCCTC
AAGTTCATTTATTCATTCATTCAATGGTTATTTTGTGGGAATCGAATTTAGAATGAAA
ATATTTTTTGGCAAGCAGAAAATAATTTTTAGACCAATCCTTTTCTTTTAGTCATGAG
AAACTGAGGCCCAGAGAGAGGAGGTCACCCCAGGTGCATTAGAACTGGGTTTCCAG
AACTGACACTCCACTGCACAGAGTACTCTCCCAATTCATTCAATTTTTATTTAGCGGA
AGGCATTTTCAGATGGGTCTTTGAAGCATTAGTAGGAGTTCAGCGATGATGGTGTCA
TGAGAATTTTATTCTAGGATTAGGAGGTACCATGAACAAAGATACAGAGCTGGGAA
AACCAGAGGTGGAAGATAAGGAGCACATGTCCACAGTTCTTTTTCTTTTTTTTTTGAG
ATGGAGTTTCGCTCTTGTTGCCCAGGCTGGAGTGCAATGGTGCAGTCTCAGCTCACT
GCAACATCTGTCTCCCGGGTTCAAGTGGTTCTCCTGCCTCAGCCTCCCAAGAAGCTG
GGATTACAGGTACCTGCCACCACGCCCGGCTAATTTTTGTATTTTTAGTAGAGAAGG
GGTTTCACCACGTTGGCCAGGCTAGTCGCAAACTCCTGACCTCCTCAGTGGATCCGA
GGAGGTGATCCTCCCGCCTCAGCCTCCCAAAGTGCTCGAATTACAGGTGTGAGCCAC
CACGCCTGGCCTCCACAGTTCTTTATCCACCGTCTGAAATGTAAAATGTTACGAAAA
CCAAAAGTTTTTTTTGTGATTTATTTGATGGTAGCACCTGACGTGAACTGACATGAGA
TTATTTTTAATTTAGTTGTGTGAATATGCATATTCATATATTTTGCTGCATAGATTACA
GTATGCAGCTCCAGATTCTTCCAAGCAGACTCTGATTGCCCATTACTGCCTTTCTAAA
ATCCAAACAAGTTCTGAGGTTCAAAACCGTTTTGGCCCTAAGGCTTTGGGTAAAGGG
GGTGGACTCTGTTCTACTCTGACTGGAGTCCAAGATGCATATATACAGAGATATGGG
TGATGGGGCTGCAAGGTAGGTTGAGGTAGGGGCCAAGGAGGAGCATGGAGTTTGGA
CTTGATTCATGAGGCTGTGGGGAGCCAGTGAAGGTTCTTAAGCAGGTATGTCTGCCT
GAGAGCAGTTGGAGCAGACAAGAGCTAAAAACCAAACAAATCACCATAGATAGTG
GCTGCTATAATTTGTTTGTCCCCTCCAAATCTCATGTGGAAATTTGGTCCTCAGTGTT
GGAAGTGGGGCCTAATGGGAGGTGTTTGGGTCATGGGGGAGGAACCCCTGTGAAAG
GCTTGGTGCCGTCCTTGTGATAATGAGTAAGTTCTCCCGCTATGATTTCCCTTGAAGG
CTGATTATTAAAAAGAGCTTGGCACCTCCCTCTCTTCTCTCTTGCTTCTTCTCTTGCCA
TGTGATTGATCTCTGCACATGTAGGCTCCCCTTCACCTTCTGCCATCAGTGAAAGCAG
CTTAAGGCCCTCACCAGAAGCAGATGCTGGTGCCATGCTTCCTGGAGAGCTTGCAGA
ATCATGAGCTGAATAAATCCCTTTTCCTTGTAAATTACTCACCTTCAGGTATTCCTTT
ATATAGCAACACAAAAGGACTAAGACAGTGGCCTTGACTTTTCTCTCTCTTTAAGAA
GTGTTGCCTTTGCTCACTTAGTCATCCCTTCTGCCTGCATTTGTAGAGCATCTGGATG
GGAGATTTATATAACCGTCACTCTTGACTTTCCCAGCAGGCCTATGTCATAGGTACT
GTGGTCTCTACAATACAGCAGAGGTATCTGAGGCTCCGAGAGGTTGAGTGACTTGCT
CATGGCTGCACAACCAGTAAATATTGGAGCTGGAATTCAGGTCCACGGTTTCCTGGC
TCCAAAGCCCATGATTTTTTCCCTCAATTTATTCTGACTGGGGCATGGGGGAGGGGG
TGGCCTTTGGGCAGGGCCACCAGGAGCGACCAGGCCCGTAGAGAGCTGGGTGCAGG
TACAGAGGAAAACCTGTTGTCGAGTGTGGCCCGTAGTTCCCATTTTTGCCTGAATGG
CACATTTGAAAGTGTTATATAACCATGTGAATAATAATAGTTGGCCTATATGAGTTC
TTTAATTTGCTTTTTGGTCCGCATTTGGTAACTTCTTTATCATCTACTATACTCTGTTG
TGTCTCTTTTGTTGTAATTTGTAAGTAGGGGTGAGATAAAGTACACCTAGGGTTTGCT
GGGTTTCTTCCATGTCATCATGTTCCTCCTTGCATGGGGCCAGGATCCGTGGAGGTTG
CCTGGCACCTACGTGGTGGTGCTGAAGGAGGAGACCCACCTCTCGCAGTCAGAGCG
CACTGCCCGCCGCCTGCAGGCCCAGGCTGCCCGCCGGGGATACCTCACCAAGATCCT
GCATGTCTTCCATGGCCTTCTTCCTGGCTTCCTGGTGAAGATGAGTGGCGACCTGCTG
GAGCTGGTGAGCCACCCTTTTTGGGAATGGCACTTCCTGATAGGGCTGGGCCACTGC
ATATACACTGGGGACTGTGCTTAGTAGGCCCATTGCTGAAAATCAGAAGGGGACAG
CAAGTATGTATTGAGCACTTATCGGGTACCAAGCACAGTAACTACTGGCTTTCTGTA
TAGAATTCCCTTTAAGCCTGGCCATGCCCCAGTGGTACGTCTATCTTCATTTGAAAGA
CGAGGAGACTGAAGTTCAGAGGGGACCACACAGACAGCTAGGGGTAGAGCCTGGAT
CAAACCCATTGGTCTGCCTGCCAGCCATTCTTGTGCCAATGCATCTGCTGCCTACGG
AAACCTGTAGGGACAAGGCCCTGGGATGTTCAGTGGAGCCTGAGTCATTTTATAAAA
AAGCATGACTCTAGGGTCCAAAATTCCTTTGAAGCTGTTGCTATCCAGAGTGAAGTC
CCTTCTTTAGGACAGGGTGGCCCTCCTCCCTCCTGGATGTCACATCTTCGGTGGAGG
GGCAGAAAGGGGACTGGGTATTCTCCTCACCCTGGCCCTAGTGCTTCAAATCTTAAA
AAAACGTTTTTATTTGTGCTTCTGCACCACCTTCTAGCCCACCTCGTTTCCTGGCCTCT
AACTTGATGAGAGCGTGTGTCATTTTCACACTGATTCTCCACATGGCAGGCGGTGCT
TCTTAGCCTCCTGCAGACAGTGAGGCCCCACGGTCTTGTCCAAGGTCACACAGCGTG
TAATGGGCAGGGTCAGAGTCTGGAGTCTGGACCTGGGTCTCCTAGCTGCACTGCACT
GCTGCCCCATGGGTTAATCAGCTCAGCATACCGTGGCTGAACAGCTACCTCATACCA
AGGCCTGTGGCGCCATGACAGGGATTGACAGGGTCCCTGCCTTGGAAACCCGTAGTC
TAAGTAGAGGAGACTGACAAGTCAATGCCTTCCATCAGTCTGCTCAACACACGTTTA
CCAAGTGCCTACTGTGTGCTGCAGAGGCGAAGATGACACAGCTCAGGCCTTTCCCTT
GAGCTTACAGTTCAGGAGGAGAGACTGACCAGTGACTGCCAGTACAGTTGACTATG
GGACAATGTGCTCAGCCTTGGGGAGAGACGAAGAAGGTACCCGTATAGCACCAGAT
GACAGGCACGAGCCCCACAGGCCAGGGCAGCTGCTCAGAGGAGAGTAGGCCAAGC
AGAAGGCAAACAGAAGGCTGCAGGCATTTGCCATCGAGAGCTGGACTTCAAACTGG
GCATCATACCAGCCTGGGTTCGAGTCCTGCCCAGCCCCTTATTGGCTGTCTAACCCTG
AGCAAATCCCTTCACCTCTCTGAGCCTCATTCCTCTATCTGTAAACCAGTTATAATAA
TTGGAACATTCATTTAAGGACTAAATGAGGTCGTGAAGCATTCAGCAGATGCTAGGT
ACGGAAACTCGCTGAAGTGGGGGCAGGTTAAGAAGCCTCTGGGGATACGAAGGCAT
CCAGGGACTAGTTGTGGCAGGAGGCTGTTACCACTTAGGTCTGAAGGGTAAGGAGA
GGGAATAGCTTTCCCTCTGCCCAGTTGGAGCCGGTGGCATGGAGGAGAGGCTGCCTG
TGGGGAATCACCCGAGGGTTCACCGCTGCCATGCGCAGGGAGTCAGGAGGTAGGGA
GGGAGTGGGGCAGATGCACACCATTTTTTTTTTTTTTTGAGACTCTGTTGCCCAGACT
GGAGTGCAGTGGTGCCATATCTGCACCTCTGCCTCCCGGGTTCAAGCTCACTGCAAC
CTCTGCCTCCCGGGTTCAAGCGATTCTCCTGCCTCAGCCTCCCGAGTAGCTGGGACT
ACAGGTGTGTGCCACCATGCCTGGCTAATTTTTGTATTTTTAATAGAGATGGGGTTTC
ACCATGTTGGCCAGGCTGGTCTCGAACTCTCGACCTCAGGTGATCCCCCACCTCGGC
CTCCCAAAGTGCTGGGATTACAGGCGTGAGTCACCGCTCCCAGCTGCTGATGCACTC
TTGTCCTTCTAACTCCTGCTAGTGCCTCCCATTGGCTGAGCCCAACTGGAAGCTTTGC
AAGGGAGCTGGTGCTGCAGTTTGCACTGAGCAGGCTGGAGAAGGCTGGAGAATAGA
CTAGGGGACAAACCGAATTGCCAGTGCTGTTATGTCATGATTTAGGCATGGAGTCCA
GGGCCTGAGCTTCACTCCATGTCCATCCTGCCCAGAGCCTTGGCACAGCCTGGCTCC
CAGACAAGATGTCAAGTTCAGAATCCTTCCTAAAAGGAATCCTCTATGCCAGACCGT
GTTGCAGGGATATGGGAGTGCTGGGCTCCCAGCCTGATCAAGGAGCGAGAAAACTC
AGGCTCCTAGTCTGTCCTCCGGGGCACTAGCAGGGACAAGGTGGGAGGCTGCTGGG
CTGGGATGTGGGGACAGGTTTGATCAGGTAAGGCCAGGCTGTGGCTGTGTTTGCTGC
TGTCCAAATGGCTTAAGCAGAGTCCCCCGGCCTCTCTGGCTTCTGCAGGCCTTGAAG
TTGCCCCATGTCGACTACATCGAGGAGGACTCCTCTGTCTTTGCCCAGAGCATCCCG
TGGAACCTGGAGCGGATTACCCCTCCACGGTACCGGGCGGATGAATACCAGCCCCC
CGGTAAGACCCCCATCTGTGCCCTGCCCCACCCCATCTGAGCTGAATCCATTTGCTCT
GCCCTGGCCTGGCCTCCCTGCTGGTGGTTTCCACTTCTCGGGGGGCTTTGGGACTCAG
CACCTCCACTGACCCCTTTTTTTCTGTCCCATCCCCATCCCCTGCAGCCCCCACTGCC
TGCCTTCCTGTTGCCCCACAAATGCAAAAGTCTTGCCTTAAATGATCCTCTTTTCCTT
CTTTTCTCTTGTTTTCCTTTTCTCACCATTTGGAATGGCCCAGCAGGCTGCACTTACCT
TGGAAGGAGGGTTCATCTGATGGTGACTCTACCTAGGGCCCCCAGGCCTCTATAACT
CCCAGTGCCCTGCAGACTGGACCAGATCCTTTAATGGGATAGACACAACCCTGTCTG
GGATGCCTCTGCCTACCTTCCTGTTTTGCTGCTCCACCTGCCTCCAGCTCCGTTTGGC
TTCCTGGGGCTCCCTGCCTGGGCCACTTTGTGTCTTCCCTCTAGGCCTTTCTTTCCACT
GTTCCCTCTGCCTGGTGTGGCCTGGCTATGGAAGGGAGGGAGGAGGAGCGGCCATG
GAAAACGGTCTGCATTCTAGCAGGGACTTGCAGGTGGCAATTCAGTCGGGGAAGAC
TCTAGATGCACCTGGCCTGAGGAGAGAATGAAGGGTTCTAGTTGGACTGTGTTAAGT
TTGAGGTGCCCATGGTGTGAGGTCTGGAGCTCAGCGCAGAGATGATGCAATGTGGT
GGGTCCATGCAACATGGTGCCAGGACGCAGAGCTTGGGGTGAACTCAGCTTTCACCC
CTTACCGGTTCTCGTGGGATCTTGGGAAGCCACTTTCTTCTATGAGCTTTGTCGTTCT
TGTCTGTAAAATGGGCACATAACCCTGTCCCTGTCCTTCTCACAGGTTGCTGTGAGA
CTCCAATGAGTTGAAGGATGTGCAGATGCTTTTGGAAGTGAAAAGTTGGGGGGCTAC
TGTGTGACTTTGCATACACCCAAACTGTGTGACCTTGCATATGTCTGAGTTGCTGCCA
TTGCAACAGATCAGAGCTGGTGGGCTGGGTGTGGAGAAAGGGTTTGTGTGGGGGAC
ATCCTCTGGCAAGGGTGGCAGCAGCAGAAGTGAGGGGCCTGGTCGGTCATGTGTGC
TGACCCGGCCTGGGCAGCCTGTGGCCAGGGAGAGGACAGCTCCTCTGTAGGAAGAG
CCTGTTCCTTTCCAACCAGGTGAGACCTCTTCAGTGGAGCCCTGGAGCCCCCTGTACT
CCACATCAGTGCCTCAGGGACCTCCCGGAGCAGGCTAATATCAGAGACCAAGAGGG
ACACTGGCAGAGGATCACAGAGACCCCAGTCCAGGCAGGGACTGAGAAGATCTTGC
CCCCTAAGTTAGTTTCCTAGCACTGCTGTGACAAATTACCACCCCCTCGGTTGGAAC
AAGTTGATTCTCTGCAGTCCTGGAGGCCAGAAGCCTGAATCAGTGTCGGCAGGACCA
CTTTCTCCCGGGGGGCTCCAGGGAGAAGCTTCTCTTGCCTCTTCCGTGTCCCAACAGC
GGCAGCACACCAATCCCAGCCTCTGTCTTCACACAGCCTTCTCTGTGTCTCTCTCCTC
TTCATTGTCTCATAAGGACACTTGTCATTGGATTTAGGGCCCACTGGATCCTCCAGG
ATGATCTCATGTGGGGAACCTTAACCACATCTGCAAGGACCCTTTTTCCAAATAAGG
TCACAGCCACAGGTTGTGGGGGTTAGGATGTGAGTGTATCTCTTTGGCAGCCACTGT
TCCCTCCTCTCCCTTGGGCCAGAAGCAGACGTGGGGCCCTTTCTTCCCCATAGGATG
CCCATGGATTGCCCCCCTTCCCGCTTCCCCCGAGTGTCTGTGGGAGGTGGCAGGAAT
GGCAGGCAGGGGTGTGGAACCCCTTCTGGAGTCATATCAAGGGCTTGGCTGGAGGA
AGTCCTCCTGGAGCTGTTGGGCTGGCATGGGGCAGGCTGGCTGGGCCCAGCAGCAG
CTTCTTCATTCATGGGGAGGCCACAAGCATGGGCCCTAGAGCTGGCTGCCGCCCTCA
AACCCAGACCCTGCACTCTTAACTGTGTGACCTTGCATACGTCACTCACCCTCTCTGA
TCTTCAGGTTCCTCTGCAAAAGGGAGGTAATGATAACCCTCACTCTGGGGGGCTGTT
TGGAGGGTTAAATCAGTTATTGCTGTAGCATGCATTTCTCTGTCAGGTATTGAGTGA
GGTGCTGTGATTTTAGCCCTGCATTTTTCTTTTCTTACCATTCAATAATAACGTTTTGA
GCACCCACTGTGCGCCAGGCACCATATTAGGTGCTGGGGATACAAATGTGAATGAA
ATGAATGTGGTCTCTTCCCCCAACAGTGTATCCAGAAGATTAATCCATTCCTTAAAC
AAATGCTACTTGACACAGATTAGTTCTGGATAGGCTGAGAGCTCTGAAGGAGTGCA
GGCAGCTGCGAGCCTGTGTATCCAGCAGAAGGATCAGGAAAGGATTCCTGGAGGAA
GCGCTGTTCTAGCCAAGACCTACGGGGGCATTATTAACCAGGCAAAGGGGACGGTG
TCCAAGCAGTGGAATGAACGTGGATTGAAGCTGTGAGGCAGGAGGGAGTGTGGCCT
GTGCAGAAGGGACCGAGGCTGGTGAGACCAGGAGGGCCTGGGTGGCCTCCAGGTCA
GATGTGAAAGGAAGAACTTGGCCACAGTCTGAGCTTCTCAGGCGTATGGCAGGGCT
GCCTGGTGAGAGGGAATGAGCTCCCTGCTCTGGAGGTATGCAAGCAGGACTGGGCT
CTCACCTGCCAGAGGCCACAGAGCTTTCCAGAGGCTGGAAGAGGCCACTCCAAGGC
CTCTTTGCCCCTGAGAGTGGTGGCTCTTCTTGAGGCCACCTTGCCACGCTGTCACAGG
GAACTAGCAGCCCCTGCCTCACCCGGGGGTTTGGAAGATAGAGGGAGGCCTAGGAA
GGGCCCTGTGTCTCATCCGAGCTGGGCCCCTTTCCAGCCTCTCACTGGAAGGAAGCC
CAAGGATGTTCCTGTGGGGGCTTTTACCAGGCCCACCTGCCCTCTGCTGGCCATGCTT
GCAGCCTCCTGACCCTGTCCCAGCAGGACAGTGGGCTGGTGTGAGCGGGCAGGAAC
CGCCTGCACTTAGAAGGTGTGGGGCTGCCTCCCCGAGCTTCCATCTGCCGCTGGGGC
CACACCCCAGGCCCAGGGATGGGACCCCACAGTGGTCACATCATCTTGCAGCAGAA
CCCAGGTACAGCTCCTGGAGCAGATGGTGGTCCCAAGCACGGGTGGGACCAGAAAG
GACTCTCACCTGGGCTAACTCAGCTGCAGCCTCAGTTCCCTCCTCACACACGACGAG
GAACATGGACTGGAAGCCTGCCCAGCAGGCCTTCTGCTCGATGTGCGTTGTGTGGCT
TACGTCCAGGGAGGGAAGCAGCCTCTGTGCTGTCTTCTAGATAAGCCTGTATTCCCC
GGGCTGTCTGCCAATGTATCCAGTTGTCCCGTCAGCCTGGAAGCTCTGAGGGAAAAC
CTTGGGCTGCTTCCTGAGCACCTGTATCCCCTGCAGCCAGCCCGGGGCCTCTGCTAG
GAGCAGACTGAGCATGGCTTATGGGCCTGGCACCATCTGGCCTCTGCCCACCTTGCT
GGCCTTGTCTTGTGTCTGCCCCTTCGACATTCCATAGCCCAGCTCAATATCTAGTGGT
TCCTCTAGGGTGGCGAGCACTGTTTGGTCTCCAGATGTCTTCAGGTCGGAGCTCACA
GCGCTCTCAGCCACCCCTTCCCAGTGTAGCACCGGGCACATGGTAGATGCCTATTGA
TGAGTGAAAGCTCCTAACACACTCAGAGAGCAAGGACTCCGCCTCATCCCACAGCCT
GGGAGGAGAGGCAGACTGCCAAGGACCTGCTCAGCATGCTACAGAAGAAACCAAA
GTGCCCACGGGACTGATCAGTGGAGCTTCCTGCCGAGACTGGAGGCCTTAGGGCAG
GGTAGACAGTGTGTGTGCAGGCTGGGGACTCACAGTTCGGACTGTGCCCAGACCTAC
TAGCATAGTGGGTGGGTGGGAGGATGCGGGACTGGGGGCCGACCTTGCCTGAAATT
CATGTGGGATCTCAGAGCAGCCACTGAATTGCTCTGTAGGGGGCTAAATAGTGGCCC
CCACAGATACACACACCCAGACAGAGCCTGTGAGCCAGACCTTATTTGGAGAAAAG
GTCTTTGTAGATGTAATTAAGCATCTCAAGATGGCATCATCTGGATTATGCGGTGGG
CTGTAAGTCCTGTGATGTGTCTTTATGAGAGAAAGGCAGAGGGAGATTTGACACACA
CAGGAGGGGCCACGTGGAGACAGAGGTGGAGATTGGAGAAATGTGGCCACAAGCC
AGGGAACACCAGCAGCCACCAGAAGCCGGAAGACGTGAGGCAGGGTTCTTCCCAGA
GCCTTCGCTGCTGAGTCTGGGAATTTGTGACCGAAGCCATAAGAAGTGGGTACACGC
CCTGAGCCTCCCACACTTGCTCACCTGTCCTGAGATGAGAATCTCTACTCTGCAGCAT
ATTTGGAGGATCACTGCGGGGGCCACAGAGGTGCTGTTCAGATGGCACTTCAGAAG
ACTCAGGAGACCCTGGGGCAGGAGCAGTTTGACTGACAGCCCAGAGGGCTGCCCTC
TGATTCCACCTGAGGCCCTGCTTTTCCTGGCTGCAGGGGTTCCAGGGCCAGGCCATT
TCCGCTGGCGCAGGACTCTGCTAGCAGCAACCTGCCTGAAGTCTTCCTTTGGCCTGG
CTGAGAGTTTCTGAGACCTGCGCTGGAGCGGAGGTGCTTCCTTCCTTGCTTCCTTTCT
TCCTCTCTCCCTTCTCCATCCAGCAGGCTGGACCTGCCTGGCATCTGTGAGCTCTCCC
TACTTTCTCCTATACCCTAACCTTTGTCCTGCATGGGCGACTCCCCCAGTGAGTCTCT
TGCAGCTTTTACCCCAGTGCCTGCTTCTTGGAGAATCCAAACTGATCCAGTTAGGGA
TGATAAAGTGTAGGGTAGGCGCTCGGTGACTGTTTTCTCTGAGGTTGTGACTCGTGT
GAGGCAGAAGCAGTCCCCGTGAGCCCTCCTGGTATCTTGTGGAGTGGAGAACGCTTG
GACCTGGAGCCAGGAGGCCCAGACATACATCCTGTCCGAGCTGCAGCTTCCTGTCTC
TAAAATGAGCCGGCCAGCGCAGGTGGCCAGACATCACTGTTATTCTCCTTTGAGTCT
TTAAATCTTGTTGTCTTTCTTGCAGACTCGGTGAGCTGTGAAAGGCTATAATAGGGG
CTTTATTTTACACTTTGATACTATTTTTTGAACATTCATATTATTGTTAGATATTGATA
TTCATATGAAGGAGCAGGATGACTTGGGTCCTTCTTGGCAGTAGCATTGCCAGCTGA
TGGCCTTGGACAGTTACCTGCCCTCTCTAGGCCTCCCTTTCCTTGTCTATGAAATACA
TTATAGAATAGGATGTAGTGTGTGAGGATTTTTTGGAGGTTAAACGAGTGAATATAT
TTAAGGCGCTTTCACCAGTGCCTGGGATGTGCTCTGTAGTTTCTGTGTGTTAACTATA
AGGTTGACTTTATGCTCATTCCCTCCTCTCCCACAAATGTCGCCTTGGAAAGACGGA
GGCAGCCTGGTGGAGGTGTATCTCCTAGACACCAGCATACAGAGTGACCACCGGGA
AATCGAGGGCAGGGTCATGGTCACCGACTTCGAGAATGTGCCCGAGGAGGACGGGA
CCCGCTTCCACAGACAGGTAAGCACGGCCGTCTGATGGGAGGGCTGCCTCTGCCCAT
ATCCCCATCCTGGAGGTGGGTGGGGACTGCCACCCCAGAGCGTTGCAGCTGTACTCC
TGGGTTGCACCCCCCCCAGCTGTCACTGTCCCCTCCCTGCCATCAGTTGTGGGAAGG
GCGTTCATCCATCCAGCCACCTGCTGATTTGTTATAGGGTGGAGGGGGGGTCTTTCT
CATGTGGTCCTTGTGTTCGTCGAGCAGGCCAGCAAGTGTGACAGTCATGGCACCCAC
CTGGCAGGGGTGGTCAGCGGCCGGGATGCCGGCGTGGCCAAGGGTGCCAGCATGCG
CAGCCTGCGCGTGCTCAACTGCCAAGGGAAGGGCACGGTTAGCGGCACCCTCATAG
GTAAGTGATGGCCCCAGACGCTGGTCTCTCTCCATCTGGACCTGGCCTGGGAGGTGG
CTTGGGCTGGGCCCAGGGAGAGCTAATGTCTCCTAACCAAGAATGCTGTGGCAGCCT
CTGCCGCAGAGCCAGAGAACCAGAGTGCCAAGGCTGGCAGGGTTCCCAGTGGCCAC
GAGTGCAGATGAAGAAACCCAGGCCCCAAGAGGGTCATGCAGGTAGCCCAGGGAGT
TCAGCCTTGACCCTGGGTCAATGACCTTTCCACAGTTCCACACTGCTCCCCTTTTAAA
ATCCGGTGATGTCTTTATGTCTTTTGTTATGTTATCTTCAATGTGGAGGGACTCGAGG
TGATCTAAGCAAACTTTTTCTATCTTCTGCTTGCATACCTCTGAGACCAGGGGACTCA
CTCACTTGCATGACTGGGCCCTGCAGGTCACACTGGCCAGGCAGATGTGGTGGAGG
AACTGGCAGAGGACTTTTTCTAGACTGTGACTACATTTAGTCCACCCAGCGGCCCCC
CTATGAAGTCCAGTTGAGAACTAGGACTCTGGGGGCCGGTGGACAGAGAAGAGGGA
GGGTTCTCTCCCTTACTGACTTCCTTCTGTGGCCAGACATTGAGCAAGGCCTCTGTAC
AGCATGTCCTGGGGCTGGCCTTGCCGTAGCTGCTAAATAGTTGACGAAACCAGTCCA
GAGAGGGGAGGTGACTGCCAGGGTCGCACAGCTCAAGCTGGGGAACTCGCTGGGAA
AACTGTCAGCTCTGGGCAGCAGCTTGACTTCCACTGTAAGCCCCAGCCCCCAGGGTC
AAACACTGGCTCTGGTGCTGGCAGAGGCAGCCCACTAGCCTGTTTCAAAGGCTGAG
AAGGCCCAGGAGTCTGCCCTGTGCTCCACCAGTTCTGCCCTGAGACTTTCCTACAGA
GTACAGGTTTTGATGTTCAGTTTTAAAGGCAAGAATCAATAACCTTCTGCCCCATCA
GGTGACCCCTTGTGCCTGTCCCACCCCTTTATTGACTGACCTCGGCTCAGTCAGGTCA
GTTCCTGAAGGTCAGTGTGTGGAGGGGAGGCTGTTCTTTCCCAGAAAGGCCTTCCCC
AGGCCTGGTGCTCTGGCCTCTGGAGGACTTCCTGGAGAAGTCCCTTCTTTGGGGTCC
CAGTCAGTGTATGGGAAGCCCTTATTGCATGACCTGGCACGGGGCAGGGGCTCAAC
AGTCACTATTGCCTTCCTTGCCACTGCCATTTCCTCCTCTGTAAGCAGGTGATTGTGT
GTCCAGTCTGAGCACAGAGATAAGCACACAGCAGGTGCTTAATAACTAGCAGCTGT
AGGCTGGGCGCGGTGGCTCATGCCTGTAATCCCAGCACTTTGGGAGGCCGAGGTGG
GCAGATCACCTGAGGTCAGGAGTTCGAGACCAGCCTGTTCAACATGGTGAAACCCC
GTCTCTACTAAAAATACAAAAATTAGCCAGGCATGGTGGTGGGTGTCTGTATCCCAG
CTACTTGGGAGGCTAAGGCAGGAGAATCGCTTGAACCCAGGAGGTGGAGGTTGCAG
TGAGCTGAGATCGTGCCACTGCAATCCAGCCTGAGTGATAGAGCGAGATTCCATCTC
AAAAATAAATAAGTAAATAACTAGCAGCTGTAAATGTGGCTGTTGTTCTTCACCTCC
ACACTCAGTGCCACTCCACTCCCTCCCTCCGTGGTGTGAGGGGCCTCACTAGCTGTCT
CCTAGGAGGAGCATGGCTGTGAGATTCCAGCTCCATCCTTGGCCACGGCTCCTGGAG
ACATCTTAGAGGCCAGGATCCAGAAGGCTCCCACACCTCATTTGACAGGGGAGAAG
CTGTCAGTTCCAGGTCCCCTTGCACATCAGGGCCAGAGCTGCGTTAGGCCTCCAGTC
TCCAGGCCACTGGGCCAGAGCTCACAGGCTGGCAGAGGGTTAGAACTGTTACTGGT
GGCTGGGTGCAGTGGCTCACGCCTGTAATCTTAGCACTTTGGGAGGGCAAGGCGGG
AGGATCATGAGGTCAGGACATCGAGACCATCCTTGCTAACACGGTGAAGCCCCGTCT
CTACTAAAACTACAAAAAATTAGCCGGGCGTGGTGGCAGGCGCCTGTAGTCCCAGC
TACTCAGGAGGCTGAGGCAGGAGAATGGCGTGAACCCGGGAGGCGGAGCTTGCAGT
GAGCCGAGATTGCGCCACTGCACTCCAGCCTGGGCAATAGAGCGAGACTCCGTCTG
GAAAGAAAAAAAAAAAAAAGAGCTGTTACTGTTGACAGTAGCATGAGGTAGACCAT
GGCCTGCACCAAAATGGGGGAGTGGAGTGCCACTGAGGCCAGAAGGAACCACACCC
TCAAGGGTGGGGAGTTATGGTATGGGGGGTCCTAGGCATGGAGTCTTTTAATTCTTT
AGACAATCCTGGGAGCAACTGTCCCTGTTTCACAGAGGGCGGGGCCACACAGCTGG
TGAGTGGGCAGCCAAGACTCTGTTCAAGTTTGTGTGGGTCCAACACTTGCGGCCACG
GTGGAGGGGCATCTGAGCCAGGCCTCAGAGAGTGGCGGGGGAAGTTGGGTGGGGA
AGTGTGCCCTTCTCATTCCTCTGAGGCTCATCCTCTTGGTGCCTCTCTTTCATGGAAA
GGGATAATAAGGTTATTGTGAGGATCCCCTGAGTTCGTATATTCAGACGCTTAGACA
GAGCCAGGCACAGAGAAGGGCCCGGGGTTGGCTAGTTTGATTGCTGGTGTAATTGCT
AATATCTTCCAGTTTGTATTGGTCAAGGTTCTGCAGAGAAGCAGAACCAGTAGGATG
TATATATTAAGAGTTTCAAGCTCATGTGACCGTGCGGGCTGGCAAGTCTGAAATCCG
CAGGGCAGGCCAGGCAGGCTGGCAATTCCTGCAGAATTTGATGTTGCAATACTGAGT
CCTAAGGCAGTCCTGGGGCAGAATTCCTTCTTCCCTGGGAGGCCTCAGTCTGTTCTCT
TAAGGCCTTCAACTGATTAAATGAGGCCTGCCCAAGTTATAGAGAGTAACCTGCCTT
ACTCCGTCTTCTGATTTAAATGTTAGTCACATCTAAAAAATATTTTCGCAGCAGCATT
TCCACTGGCTTTTGACCAAACATCAGGCCACAAAGTTGATCCCCAAAATTAACCATC
ACTCTGTGCCTGTAAGGGAGGGGCTGGGAAAGGGGAGCAGGTCTCCCCAAGGGGTG
ACCTTGGCTTTGTTCCTCCCAGGCCTGGAGTTTATTCGGAAAAGCCAGCTGGTCCAG
CCTGTGGGGCCACTGGTGGTGCTGCTGCCCCTGGCGGGTGGGTACAGCCGCGTCCTC
AACGCCGCCTGCCAGCGCCTGGCGAGGGCTGGGGTCGTGCTGGTCACCGCTGCCGG
CAACTTCCGGGACGATGCCTGCCTCTACTCCCCAGCCTCAGCTCCCGAGGTAGGTGC
TGGGGCTGCTGCCCCAAGGCGCGGGTAGGGGGCGGAGGGCGGAGGGCGGAGGGAG
GGCGGGCGGGCAGGCGGGCTTCTTGTGGCACGTGGGCTTCTTGTGGCACGTTCCTGG
AGGCCGAACCCTTCTGGCTTTGGAAGGAGTCGTCAGAGACCCCCGCCATGCGGGAG
GCTGGGGAGGAAGGGGCTCGAAACCTCCATCATCGCAGAGTCTGAATAGCAGTGGC
CCCGCCATGCGCCCACGTAGCGGCGCCTACGTAGCCACGCCCCCACACCCCGTCCTG
GCCACTCTCCCTCCTGAAGGTCTTCTGGTACCCGCCCCCTCCCCATCTCCATCCCCAG
GCCCTGCGTCCTCTGCCCAATACTCTTTGGGCCTCCCTGTTGTCCAGCTCTCTCCGCG
GCTCCATGACTGACAACTTGAGCAAGGCTAATGTGAATGGGAGCGGTTGAGGGCTC
AGACCTCTCACCCGAGGAACATCCACAGAGTGTGCCGCATGCCCGGTGCAGTGTGG
CTGCGGGGACACAGACACGGAGCCTCGGCCCTGAGGAGCTGGGGGGCAGTGACCGT
CCCTCCTCTGACCCACCACTCCTCCAGTGTCAGGACACTGCGGGTATCTAGGGGAAG
GAATCTTGTTCCACTTCAAGTCTGGAACTTCAAGTCTGTGTGTGTGCGTGCGCGCGC
GCGCGTTGGGGGTGGGGGTTGCAGAGCAGATGCGTACCTGACAGCGGTAACCTAGG
TCCCCCCTGGCCTATCAAGGCTTCCCTGGCGGCCGAATTTAAAGGCATCAAGCAAAC
AAAGCCCAACACATCTCTGCCTTGTCCTCTCAGTTTCCCCCCGTGGCACTTAGAACCA
CTTGATACACCGAATAGTTTCCTATCTCCCCCACTAGGATGTAAACTCCACAGGGGC
ATTGGGAATGCTGCCTGGCTATGGTAGGGACAGAGGGGAGCACCAGGGCGGGGCAG
GGGTGCCAGAGTTCTGCCTGGGCAGTCAGATTTTCCTTAGGAGGGGACATTTGAGTG
GGACCCAAACAGGTGTATAGCAGTTGTCCAGCCCAGCTGGCAAGGCCTGAGTCTGC
CTCTGCAACCCCTCTCTTGGGCTCCTTTCTCTGCCACCCACCTCCTCACCTTTCCAGGT
CATCACAGTTGGGGCCACCAATGCCCAAGACCAGCCGGTGACCCTGGGGACTTTGG
GGACCAACTTTGGCCGCTGTGTGGACCTCTTTGCCCCAGGGGAGGACATCATTGGTG
CCTCCAGCGACTGCAGCACCTGCTTTGTGTCACAGAGTGGGACATCACAGGCTGCTG
CCCACGTGGCTGGTAAGTCACCACCCCACTGCCTCGGCCACCGTGATGCTAACAGCC
CCTTTGGCAGTCAGGGTCTGTGCCGGGACCTCCAGTGCCAGGCTCTGTGCAGGGGGA
CCAGAGATGAAGTAGGCCTGATGGTGCCTTCAAGGACACTCAGTCTGATGAGGGAG
GCGAGTGCACAGAGGAAACACGAGGTCAGGGCTGTATTAGAGGGAGCCCAGAGGA
GGCACCTGCCCAGCCCGAGGGTCAGAGAAGGCATCTTGGAGGAGGGACATTTGATC
GGGAGCTTGATGGATGAATAGGAGTTCACCTGGCCGATAAGACAGCAACTACCAAG
GCTTAGAGGTGTGAGAGGAGGCTGTCTTACCTCACTGAGTAAGGACTGCAGGCGGC
TTACCTTCGAGAAGAGAGCTTAGTGTCTGTGTGCACGTGTGTTTGTGTGTATGTGTGT
GCGTGTGTGCACTGGCAGGAGTCCCCTGCTGGGGCAGGAGGGCCGGGCCATCACCA
TCTTTCACCATTCACCCCTGCACCAGGCATTGCAGCCATGATGCTGTCTGCCGAGCC
GGAGCTCACCCTGGCCGAGTTGAGGCAGAGACTGATCCACTTCTCTGCCAAAGATGT
CATCAATGAGGCCTGGTTCCCTGAGGACCAGCGGGTACTGACCCCCAACCTGGTGGC
CGCCCTGCCCCCCAGCACCCATGGGGCAGGTAAGCAGGATGGCAGGGTGGGCAAGT
CCAGGCTGGGGCTTGGGAGGTCTGTGTGACCTTGACAGTCTCTCCCTTCTCCCTTGTC
TGTGTAAGGAGGATGACGCCACCTTAAATAGGATTAAATGAGAATGGGGCTCTGAA
AGGGCTGTGCAATATTTTCATAACGTGTTTTTATAGAGACAGTTGAGTATGTTCTTTA
AGCCCTCCTCTCTCCTACCATGAACTAAAGATTTCTGTGGAGGTCCCCTCACTCCCAG
CACCCCCTCCTCATCCCAGGCCCTTTTTGCAGGTTGGCAGCTGTTTTGCAGGACTGTA
TGGTCAGCACACTCGGGGCCTACACGGATGGCCACAGCCGTCGCCCGCTGCGCCCCA
GATGAGGAGCTGCTGAGCTGCTCCAGTTTCTCCAGGAGTGGGAAGCGGCGGGGCGA
GCGCATGGAGGTGACTGTACCCCTCCTTCGTGTGTGTGTGTGTGTGTGTGTGTGTGTG
TGTGTGTGTGTGTGTGTGTGTGTCAGTGCTGGGCCCTCAGGGACCCCCAGCAAGCCC
CTCCATCCTCCAGACTCCAGCTCTTCTGTAAGCTTACAGGGCTGGCCAGACCAGGAG
TGGGGCACTCCTCACTTCACGCGGCTGGGGGCTGCTGGAGAGAGCCACAGCGGGAA
GGGTTTCCTAGAGGCTGCAGGACAGTGCTGGATGGATTTTCAATGCTCACCTGGGTG
TGAGCGTGCGGCAGGGCCGCGTGAGGGTCAGCGATCTGCTACTCTGGACTCAGCCAT
CTCTAGGCCCCTCTCACTCAGGTGCTCCATGGTTCTGGGAGCTGAGAAATCTCAAAC
CAGCAAAAAAGTGGAATTGATGTTGATGCTACAGGATAGTGCACAGATGCCATCTG
GTTGCAGCATTTTGGTGGAAGGGCAGTGCCCAGCTAGGAGAGTGAGGAGGGGCAGG
CATTTCTGGCTTGAGGAGATGGGGTCTTAATGCTCGTGTGAGAGGCAGAGTGGGTGG
AGTGGAGCTGGCTGGATCCTTGCTTTGGCCTCCTGGATTTCTCTCTATCTCCATTTTG
AAACCACTCTGTGTTTGGAAGAACTTTTGAGTATTCAGAGCTGCCCACTGGCAGAAC
AGTCTTCCTTGGGCAGGAGTGAGCTCCTTGTCCCCAGAAGGCTGGGTCTGGCTGGCC
CCTGGCAGGGACACTGATGAGGGTGCTTGAGTTGATCCTGTCTAGTCCCTTTCTGTGT
TTTCAAAGCCCATTCTAAAGCAGATTCCCATTTCCGTCTTTGACTCTAAGGCCCAAGG
GGGCAAGCTGGTCTGCCGGGCCCACAACGCTTTTGGGGGTGAGGGTGTCTACGCCAT
TGCCAGGTGCTGCCTGCTACCCCAGGCCAACTGCAGCGTCCACACAGCTCCACCAGC
TGAGGCCAGCATGGGGACCCGTGTCCACTGCCACCAACAGGGCCACGTCCTCACAG
GTAGGAGGCTGGGCTTGCCCTGGGGTGAGGAGGGGTCTCTTTCTCCTTATGCACCCA
CTGCCCGCGAGGCTTGGTCCTCACAAGTGTGATCCATGAGACTCAAGCCTGACTTGC
AGTTCCATACTCTGGTTCTGCCACTTCCATGCCCTTTGAGCCTGGGCAGGTGACCTTA
CTTCTCCTCATCTCAGCTTCCTCCTCCATAAGAGGGAAAAAGGTATTACCTGCCTCAT
TGTGTTGCAAGGAGATGGGCAGCATCTAGGGCACTGGCCTGGAGTATCGCAGGTGC
TTTGCCTAAGGTGGTGCAGTCCAGGAGAGGCAGCTCCAGAGAGAGGCCCCCGGCTG
GGGCTGAAAGGAGGGCAGACCTCGGTTTGAATTTCACCCTGCCGCTCTATAGCTGTG
TGACTTGGGCAAATTACTTAACATCTCTGTATGAGGAAATGATGAGTGCTAAGCACT
TAGCTTAGTGCCGGGACAATATAAATTCTAGCTATCGTTACTATTGTTTTCATCACCC
GTTGCTTTAAAATCCAGCCTCTGGTATAGGCAACTATTGACGGGCTACCCTGTGTCG
AAAACATGCCCAGGCAGGTAGCAGGAAGTCACAGATGGGGACCTCTTGGGGCATCA
AGGGATGGTGCCCTGAGGCTGAGCTGTTCTGGTTGGGTGGAGCATGAGAGGTCTGG
GAAGACAGTGGGACTCCAGCCTGGAATAAGAGGCTCAGAGTTGATTCTCGTCTGAG
CACGTCCAGGGGAACCACTGAGGGTTTGGGAACAGGAGAGTGAGGGTGAGAACCTG
GTTCTGGGCACAGCAGGCTGGCATGTAGGATGGATGTTCAGGAAAGATGAGCATAG
TCAGGTGGCTGGTGCCCTTGTCCAGGGGAGAGGCTCCGTCAGGTTCAGGGGTCCTGG
CTTGGAGGGAAGTCCGCCATGCTCTAATCACGCTCCCCTTTGGAAGTGCTCAGCCGA
TGAGCTCACAGGCACATGTCAGTTTGAAGTCATGGAATCTGACTCCATGAAGCGCAC
CTCAAAGAGCACCATTTTGCAGCTAAGGGAACTGCAGGCTGGACATGCTGAGTGGC
TGCCCCGAGCCCTTGCAGCTAGGACATAGAGAATGCTAGTAACCACAACCCTACCAT
GTTCAGAGCACATGCCAGGCTCCATGCTGGGGCTTCGCACGTGTCATCTTCACAGTG
TCCCTGTGAGTAGGTGTGGTTTCTCTTTCCATCTTACAAATGAGTAAACAGAGCCTCA
GTGTAGCTAAGTAACCACTATTTTAGGTTTCTTAGCCAATGGGTGTGTCTGACTCCTA
AGCCCATGGAGGGCATTCTGAGGTGGTTCAGACAGACCCCGGCTTACCCTTGAACTT
CTGCCTGCTGGCTGCATAGGGAGGGGCTGGGGGGAGTTTGAGCATCTCAGGCCATA
GAGCCCCTGCCTCACTGTCTCCATCTCTGGGTGGAAAGATGGTGTTTTCCCTGAGAA
ACTAAGGCTCAGAGAGGTTGAATGGCTCTCCCAAGGTCACACAGCTGGTCAGCTGC
AGAGTTGAGAACACAGGAGTCCTGGTGCTCAGGCCAGCATCTCTTTTTTTCTTTGAG
TTGTTTCTAGGTTTCCTAGCTCTTGCCTCAGACCTTAAAGAGAGAGGGTCTGATGGG
GATGGGCACTGGAGACGGAGCATCCCAGCATTTCACATCTGAGCTGGCTTTCCTCTG
CCCCAGGCTGCAGCTCCCACTGGGAGGTGGAGGACCTTGGCACCCACAAGCCGCCT
GTGCTGAGGCCACGAGGTCAGCCCAACCAGTGCGTGGGCCACAGGGAGGCCAGCAT
CCACGCTTCCTGCTGCCATGCCCCAGGTCTGGAATGCAAAGTCAAGGAGCATGGAAT
CCCGGCCCCTCAGGAGCAGGTGAAGAGGCCCGTGAGGCCGGGTGGGTGGGGTGCTG
CGTGTCTCTCCTGCACAGCTTTTCTGTGTCAGTTTGTGCCACCACCATACCGCCATGC
ATCAGGGTGGCGGTTTGCCAGGTAGATGCTGTGGGCAGCTTCCGCCATTGTGTGGAC
AGCATGTATATGTGTCTCTGTGTGGCTGGGTCTGTTTTTGCTTTTGTCCAGATCAGTA
AGGTTTGCTACCTGGGTACCCCACTCCACTTGGAGTAGAATGTGCATAAATATGGCA
TAAAGAAATGCAATATGCATGCATTTATTGATTGATCTATTTTTTTCTGAGATGGGGT
CTTGCTGTGTTGCCCAGGCTGGTCTCAAATTCCTGGGCTCAAGCAATCCTCTGGTCTC
AGCCTCCCCAAGTGTTGGGATTATAGGCATGAGCCGCTGCACCTGGCCTCTCTGATC
TATTTAACAAACCTGCTGGGAGGGTCTCAGGGTCAGGAGCAGCACTGGGCTCTGAG
GACACAGAGCTCACTCAGCCGTGACCCAGAGGGGGTGCCTGAGCTGCATGCTGAAG
GTTGTTAGCATGACCAGCAAGGCAAGAAAAGGCCCTGCCGAGATTAGCAAGGCATG
TGCCAAGCCCTGGAATGTGACAGCCGGGCCTTCTAGAAACCTGAGTGTATAACTCTC
CTTAAAAGCCAGTAGGAGCTCCTCAAAAGGCAGCCCTAAGGAGTCCACTCTTAAAT
GAACTCAGAGTCAGTTTTAAAATGCAAGTCTGTGTTGATTCTGGTCTGGATGGTGCA
TTCCTCGAGAGCAAAAGACAGTCTTGGTCTTGGATCCACTTGCCCTGGGTACACTGA
GGGCTGCTAGGTTCCAGGTGCTCTTCCTGGCACTGGGGAGGGATACAGGCCCAAGA
GACATGCTGTTCTCCCTCCTGGAGCATCTATTTTAGTGGAGGAAGACAGAAAACAAA
CCATTAATATAGAGTACTGAAAAGATGCGATGGAGAAAACTATAGCAAGGAAGGGA
ATGGGGTGGGAGAGAGGTCAGGAGAGGTCTCGCTGACAAGGTGGACGAAACAGGC
CATGAGGCAGAGAACATGTTCCAGGCAAAGCAAAGGCCCCCAGGTGGGGATGTGCA
GGGAGTACCAGGAAACCAGAGAGGTGGGAATAGTTATGAGATGGGGGGTGCCTCAG
AGGGGACAGGGCCAAGTCAGGTGAGACCTGAGGGTCACAGTCAGCAGTGAGCTGGG
GCCATGCAGGGGTCTGGCCTCAGAGGAGTGTGGTCTGGCCTGGATCTGAACCTCTCA
CTGTGGCCTAGCTGCTGAGCTGAGAAGAGATGACAAGGACCTTGGGCAGAAGCAGG
GAGACTGGAGGGAGGCGGTGGAGGGTCCAGGCGTTGGGGGGGGCTCAGGCTGGA
GTCTGAAGGGAGCCTGCAGGCCTGGTGGGTGGATGTGGGTGGGAGAGGGGGAGGAT
GGCACCAAGGCTCGGGCCCCTGGACAGATGGAGTTGCCATTAAGTGGGATGGGGCA
GGCTATGGGGCCATCAGTTTCAGAGGGATGAGTTTGGCACTGGCATGGTAGGCATCT
GTCTATCTCCACGGCCCTCAAACCAGGCATGAAGCAGGAGCTCACGTGTTTGGTCAG
CCATGGTGCAGAACCGCCTGGGTGGGAGGTGCGGGGTGGGAGATACACGGTTGTGT
CCCAAATGGGCTCTGAGCCAGCGAGGGCCGTCTGCACTTTGGCCTCACAGAAGGAT
GTCGGAGGGAGAAATGAAGTGTGGGTGGGGGTCCCGGGCCACGCTAGACATGTGCT
TTCTTTTCCTCGGGCTCTGGCAGGTGACCGTGGCCTGCGAGGAGGGCTGGACCCTGA
CTGGCTGCAGTGCCCTCCCTGGGACCTCCCACGTCCTGGGGGCCTACGCCGTAGACA
ACACGTGTGTAGTCAGGAGCCGGGACGTCAGCACTACAGGCAGCACCAGCGAAGGG
GCCGTGACAGCCGTTGCCATCTGCTGCCGGAGCCGGCACCTGGCGCAGGCCTCCCAG
GAGCTCCAGTGACAGCCCCATCCCAGGATGGGTGTCTGGGGAGGGTCAAGGGCTGG
GGCTGAGCTTTAAAATGGTTCCGACTTGTCCCTCTCTCAGCCCTCCATGGCCTGGCAC
GAGGGGATGGGGATGCTTCCGCCTTTCCGGGGCTGCTGGCCTGGCCCTTGAGTGGGG
CAGCCTCCTTGCCTGGAACTCACTCACTCTGGGTGCCTCCTCCCCAGGTGGAGGTGC
CAGGAAGCTCCCTCCCTCACTGTGGGGCATTTCACCATTCAAACAGGTCGAGCTGTG
CTCGGGTGCTGCCAGCTGCTCCCAATGTGCCGATGTCCGTGGGCAGAATGACTTTTA
TTGAGCTCTTGTTCCGTGCCAGGCATTCAATCCTCAGGTCTCCACCAAGGAGGCAGG
ATTCTTCCCATGGATAGGGGAGGGGGCGGTAGGGGCTGCAGGGACAAACATCGTTG
GGGGGTGAGTGTGAAAGGTGCTGATGGCCCTCATCTCCAGCTAACTGTGGAGAAGC
CCCTGGGGGCTCCCTGATTAATGGAGGCTTAGCTTTCTGGATGGCATCTAGCCAGAG
GCTGGAGACAGGTGCGCCCCTGGTGGTCACAGGCTGTGCCTTGGTTTCCTGAGCCAC
CTTTACTCTGCTCTATGCCAGGCTGTGCTAGCAACACCCAAAGGTGGCCTGCGGGGA
GCCATCACCTAGGACTGACTCGGCAGTGTGCAGTGGTGCATGCACTGTCTCAGCCAA
CCCGCTCCACTACCCGGCAGGGTACACATTCGCACCCCTACTTCACAGAGGAAGAAA
CCTGGAACCAGAGGGGGCGTGCCTGCCAAGCTCACACAGCAGGAACTGAGCCAGAA
ACGCAGATTGGGCTGGCTCTGAAGCCAAGCCTCTTCTTACTTCACCCGGCTGGGCTC
CTCATTTTTACGGGTAACAGTGAGGCTGGGAAGGGGAACACAGACCAGGAAGCTCG
GTGAGTGATGGCAGAACGATGCCTGCAGGCATGGAACTTTTTCCGTTATCACCCAGG
CCTGATTCACTGGCCTGGCGGAGATGCTTCTAAGGCATGGTCGGGGGAGAGGGCCA
ACAACTGTCCCTCCTTGAGCACCAGCCCCACCCAAGCAAGCAGACATTTATCTTTTG
GGTCTGTCCTCTCTGTTGCCTTTTTACAGCCAACTTTTCTAGACCTGTTTTGCTTTTGT
AACTTGAAGATATTTATTCTGGGTTTTGTAGCATTTTTATTAATATGGTGACTTTTTA
AAATAAAAACAAACAAACGTTGTCCTAAC
Human PCSK9 Amino Acid Sequence (NP_777596.2)
(SEQ ID NO: 756)
MGTVSSRRSWWPLPLLLLLLLLLGPAGARAQEDEDGDYEELVLALRSEEDGLAEAPEH
GTTATFHRCAKDPWRLPGTYVVVLKEETHLSQSERTARRLQAQAARRGYLTKILHVFH
GLLPGFLVKMSGDLLELALKLPHVDYIEEDSSVFAQSIPWNLERITPPRYRADEYQPPDG
GSLVEVYLLDTSIQSDHREIEGRVMVTDFENVPEEDGTRFHRQASKCDSHGTHLAGVVS
GRDAGVAKGASMRSLRVLNCQGKGTVSGTLIGLEFIRKSQLVQPVGPLVVLLPLAGGYS
RVLNAACQRLARAGVVLVTAAGNFRDDACLYSPASAPEVITVGATNAQDQPVTLGTLG
TNFGRCVDLFAPGEDIIGASSDCSTCFVSQSGTSQAAAHVAGIAAMMLSAEPELTLAELR
QRLIHFSAKDVINEAWFPEDQRVLTPNLVAALPPSTHGAGWQLFCRTVWSAHSGPTRM
ATAVARCAPDEELLSCSSFSRSGKRRGERMEAQGGKLVCRAHNAFGGEGVYAIARCCL
LPQANCSVHTAPPAEASMGTRVHCHQQGHVLTGCSSHWEVEDLGTHKPPVLRPRGQPN
QCVGHREASIHASCCHAPGLECKVKEHGIPAPQEQVTVACEEGWTLTGCSALPGTSHVL
GAYAVDNTCVVRSRDVSTTGSTSEGAVTAVAICCRSRHLAQASQELQ

### Base Editor Protein-gRNA Complexes

[0339] In another aspect, provided herein is a complex comprising the single guide RNA as provided herein in complex with the base editor fusion protein, e.g. the adenosine base editor fusion protein, wherein the complex comprises increased stability as compared to a complex with an unmodified single guide RNA and a base editor protein, wherein the stability is measured by half life of the complex ex vivo or in vitro.

[0340] In some embodiments, the complex comprises increased stability as compared to a complex with an unmodified single guide RNA and a Cas9 protein. In some embodiments, the complex comprises increased stability by at least 5%, at least 10%, at least 20%, at least 30%, at least 40%, at least 50%, at least 60%, at least 70%, at least 80%, at least 90%, at least 100%, at least 200%, at least 300%, at least 400%, at least 500%, at least 600%, at least 700%, at least 800%, at least 900%, at least 1000%, at least 2000%, at least 3000%, at least 4000%, at least 5000%, at least 6000%, at least 7000%, at least 8000%, at least 9000%, at least 10000%, at least 20000%, at least 30000%, at least 40000%, at least 50000%, at least 60000%, at least 70000%, at least 80000%, at least 90000%, or at least 100000% as compared to a complex with an unmodified single guide RNA and a Cas9 protein. In some embodiments, the complex comprises increased stability by at least 2 fold, at least 3 fold, at least 4 fold, at least 5 fold, at least 10 fold, at least 20 fold, at least 25 fold, at least 30 fold, at least 40 fold, at least 50 fold, at least 60 fold, at least 70 fold, at least 80 fold, at least 90 fold, at least 100 fold, at least 200 fold, at least 300 fold, at least 400 fold, at least 500 fold, at least 600 fold, at least 700 fold, at least 800 fold, at least 900 fold, at least 1000 fold, at least 2000 fold, at least 3000 fold, at least 4000 fold, at least 5000 fold, at least 6000 fold, at least 7000 fold, at least 8000 fold, at least 9000 fold, or at least 10000 fold as compared to a complex with an unmodified single guide RNA and a Cas9 protein.

[0341] In some embodiments, wherein the stability of the complex is measured by half life of the complex. In some embodiments, wherein the stability of the complex is measured by half life of the complex ex vivo. In some embodiments, wherein the stability of the complex is measured by half life of the complex in vitro.

[0342] In some embodiments, the complex comprises increased half life by at least 5%, at least 10%, at least 20%, at least 30%, at least 40%, at least 50%, at least 60%, at least 70%, at least 80%, at least 90%, at least 100%, at least 200%, at least 300%, at least 400%, at least 500%, at least 600%, at least 700%, at least 800%, at least 900%, at least 1000%, at least 2000%, at least 3000%, at least 4000%, at least 5000%, at least 6000%, at least 7000%, at least 8000%, at least 9000%, at least 10000%, at least 20000%, at least 30000%, at least 40000%, at least 50000%, at least 60000%, at least 70000%, at least 80000%, at least 90000%, or at least 100000% as compared to a complex with an unmodified single guide RNA and a Cas9 protein wherein half life of the complex is measured ex vivo. In some embodiments, the single guide RNA exhibits increased half life of the complex by at least 2 fold, at least 3 fold, at least 4 fold, at least 5 fold, at least 10 fold, at least 20 fold, at least 25 fold, at least 30 fold, at least 40 fold, at least 50 fold, at least 60 fold, at least 70 fold, at least 80 fold, at least 90 fold, at least 100 fold, at least 200 fold, at least 300 fold, at least 400 fold, at least 500 fold, at least 600 fold, at least 700 fold, at least 800 fold, at least 900 fold, at least 1000 fold, at least 2000 fold, at least 3000 fold, at least 4000 fold, at least 5000 fold, at least 6000 fold, at least 7000 fold, at least 8000 fold, at least 9000 fold, or at least 10000 fold as compared to a complex with an unmodified single guide RNA and a Cas9 protein, wherein half life of the complex is measured ex vivo.

[0343] In some embodiments, the complex comprises increased half life when measured in vitro by at least 5%, at least 10%, at least 20%, at least 30%, at least 40%, at least 50%, at least 60%, at least 70%, at least 80%, at least 90%, at least 100%, at least 200%, at least 300%, at least 400%, at least 500%, at least 600%, at least 700%, at least 800%, at least 900%, at least 1000%, at least 2000%, at least 3000%, at least 4000%, at least 5000%, at least 6000%, at least 7000%, at least 8000%, at least 9000%, at least 10000%, at least 20000%, at least 30000%, at least 40000%, at least 50000%, at least 60000%, at least 70000%, at least 80000%, at least 90000%, or at least 100000% as compared to a complex with an unmodified single guide RNA and a Cas9 protein, wherein half life of the complex is measured in vitro. In some embodiments, the single guide RNA exhibits increased half life of the complex by at least 2 fold, at least 3 fold, at least 4 fold, at least 5 fold, at least 10 fold, at least 20 fold, at least 25 fold, at least 30 fold, at least 40 fold, at least 50 fold, at least 60 fold, at least 70 fold, at least 80 fold, at least 90 fold, at least 100 fold, at least 200 fold, at least 300 fold, at least 400 fold, at least 500 fold, at least 600 fold, at least 700 fold, at least 800 fold, at least 900 fold, at least 1000 fold, at least 2000 fold, at least 3000 fold, at least 4000 fold, at least 5000 fold, at least 6000 fold, at least 7000 fold, at least 8000 fold, at least 9000 fold, or at least 10000 fold as compared to a complex with an unmodified single guide RNA and a Cas9 protein, wherein half life of the complex is measured in vitro.

[0344] In another aspect, provided herein is a cell comprising the complex as provided herein. In some embodiments, the cell may be an in vitro cell. In some embodiments, the cell may be an ex vivo cell. In some embodiments, the cell may be an in vivo cell. In some embodiments, the cell may be an isolated cell.

### Pharmaceutical Compositions

[0345] In some aspects, provided herein is a pharmaceutical composition comprising the gene editing system as provided herein and a pharmaceutically acceptable carrier or excipient.

[0346] In some aspects, provided herein, is a pharmaceutical composition comprising a guide nucleic acid described herein and a gene editor protein or a nucleic acid sequence encoding the gene editor protein and a pharmaceutically acceptable carrier. The gene editing system comprising a guide nucleic acid sequence described herein and a gene editor protein or a nucleic acid sequence encoding the gene editor protein can be formulated into pharmaceutical compositions. Pharmaceutical compositions are formulated in a conventional manner using one or more pharmaceutically acceptable inactive ingredients that facilitate processing of the active compounds into preparations that can be used pharmaceutically. Suitable formulations for use in the present disclosure and methods of delivery are generally well known in the art. Proper formulation is dependent upon the route of administration chosen. A summary of pharmaceutical compositions described herein can be found, for example, in Remington: The Science and Practice of Pharmacy, Nineteenth Ed (Easton, Pa.: Mack Publishing Company, 1995); Hoover, John E., Remington's Pharmaceutical Sciences, Mack Publishing Co., Easton, Pennsylvania 1975; Liberman, H. A. and Lachman, L., Eds., Pharmaceutical Dosage Forms, Marcel Decker, New York, N.Y., 1980; and Pharmaceutical Dosage Forms and Drug Delivery Systems, Seventh Ed. (Lippincott Williams & Wilkins 1999), herein incorporated by reference for such disclosure.

[0347] A pharmaceutical composition can include a guide nucleic acid sequence described herein and a gene editor protein or a nucleic acid sequence encoding the gene editor protein with one or more of other chemical components (i.e., pharmaceutically acceptable ingredients), such as carriers, excipients, binders, filling agents, suspending agents, flavoring agents, sweetening agents, disintegrating agents, dispersing agents, surfactants, lubricants, colorants, diluents, solubilizers, moistening agents, plasticizers, stabilizers, penetration enhancers, wetting agents, anti-foaming agents, antioxidants, preservatives, or one or more combination thereof. The pharmaceutical composition facilitates administration of the guide nucleic acid sequence described herein and the gene editor protein or a nucleic acid sequence encoding the gene editor protein to an organism or a subject in need thereof.

[0348] The pharmaceutical compositions of the present disclosure can be administered to a subject using any suitable methods known in the art. The pharmaceutical compositions described herein can be administered to the subject in a variety of ways, including parenterally, intravenously, intradermally, intramuscularly, colonically, rectally, or intraperitoneally. The pharmaceutical compositions can be administered by intraperitoneal injection, intramuscular injection, subcutaneous injection, or intravenous injection of the subject. The pharmaceutical compositions can be administered parenterally, intravenously, intramuscularly, or orally.

[0349] For administration by inhalation, the gene editing systems described herein can be formulated for use as an aerosol, a mist, or a powder. For buccal or sublingual administration, the pharmaceutical compositions may be formulated in the form of tablets, lozenges, or gels formulated in a conventional manner. The pharmaceutical compositions described herein can be prepared as transdermal dosage forms. The gene editing systems described herein can be formulated into a pharmaceutical composition suitable for intramuscular, subcutaneous, or intravenous injection. The gene editing systems described herein can be administered topically and can be formulated into a variety of topically administrable compositions, such as solutions, suspensions, lotions, gels, pastes, medicated sticks, balms, creams, or ointments. The gene editing systems described herein can be formulated in rectal compositions such as enemas, rectal gels, rectal foams, rectal aerosols, suppositories, jelly suppositories, or retention enemas. The gene editing systems described herein can be formulated for oral administration such as a tablet, a capsule, or liquid in the form of aqueous suspensions or solutions selected from the group including, but not limited to, aqueous oral dispersions, emulsions, solutions, elixirs, gels, and syrups.

[0350] The pharmaceutical composition comprising a guide nucleic acid sequence described herein and a gene editor protein or a nucleic acid sequence encoding the gene editor protein further comprises a therapeutic agent. The additional therapeutic agent may modulate different aspects of the disease, disorder, or condition being treated and provide a greater overall benefit than administration of either the replication competent recombinant adenovirus or the therapeutic agent alone. Therapeutic agents include, but are not limited to, a chemotherapeutic agent, a radiotherapeutic agent, a hormonal therapeutic agent, and/or an immunotherapeutic agent. The therapeutic agent may be a radiotherapeutic agent. The therapeutic agent may be a hormonal therapeutic agent. The therapeutic agent may be an immunotherapeutic agent. The therapeutic agent can be a chemotherapeutic agent. Preparation and dosing schedules for additional therapeutic agents can be used according to manufacturers' instructions or as determined empirically by a skilled practitioner. For example, preparation and dosing schedules for chemotherapy are also described in The Chemotherapy Source Book, 4th Edition, 2008, M. C. Perry, Editor, Lippincott, Williams & Wilkins, Philadelphia, PA.

[0351] The subjects that can be treated with gene editing systems of guide nucleic acid sequences described herein and a gene editor protein or a nucleic acid sequence encoding the gene editor protein and methods described herein can be any subject with a disease or a condition. For example, the subject may be a eukaryotic subject, such as an animal. The subject can be a mammal, e.g., human. The subject can be a human. The subject can be a non-human animal. The subject can be a fetus, an embryo, or a child. The subject can be a non-human primate such as chimpanzee, and other apes and monkey species; farm animals such as cattle, horses, sheep, goats, pigs; domestic animals such as rabbits, dogs, and cats; laboratory animals including rodents, such as rats, mice, and guinea pigs, and the like.

[0352] The subject can be prenatal (e.g., a fetus), a child (e.g., a neonate, an infant, a toddler, a preadolescent), an adolescent, a pubescent, or an adult (e.g., an early adult, a middle-aged adult, a senior citizen). The human subject can be between about 0 month and about 120 years old, or older. The human subject can be between about 0 and about 12 months old; for example, about 1, 2, 3, 4, 5, 6, 7, 8, 9, 10, 11, or 12 months old. The human subject can be between about 0 and 12 years old; for example, between about 0 and 30 days old; between about 1 month and 12 months old; between about 1 year and 3 years old; between about 4 years and 5 years old; between about 4 years and 12 years old; about 1, 2, 3, 4, 5, 6, 7, 8, 9, 10, 11, or 12 years old. The human subject can be between about 13 years and 19 years old; for example, about 13, 14, 15, 16, 17, 18, or 19 years old. The human subject can be between about 20 and about 39 years old; for example, about 20, 21, 22, 23, 24, 25, 26, 27, 28, 29, 30, 31, 32, 33, 34, 35, 36, 37, 38, or 39 years old. The human subject can be between about 40 to about 59 years old; for example, about 40, 41, 42, 43, 44, 45, 46, 47, 48, 49, 50, 51, 52, 53, 54, 55, 56, 57, 58, or 59 years old. The human subject can be greater than 59 years old; for example, about 60, 61, 62, 63, 64, 65, 66, 67, 68, 69, 70, 71, 72, 73, 74, 75, 76, 77, 78, 79, 80, 81, 82, 83, 84, 85, 86, 87, 88, 89, 90, 91, 92, 93, 94, 95, 96, 97, 98, 99, 100, 101, 102, 103, 104, 105, 106, 107, 108, 109, 110, 111, 112, 113, 114, 115, 116, 117, 118, 119, or 120 years old. The human subjects can include male subjects and/or female subjects.

[0353] In some embodiments, the guide RNA and the mRNA are administered at a total amount which results in a plasma Cmax of the iLipid in the human subject is about 0.1, 0.2, 0.3, 0.4, 0.5, 0.6, 0.7, 0.8, 0.9, 1, 2, 3, 4, 5, 6, 7, 8, 9, 10, 11, 12, 13, 14, 15, 16, 17, 18, 19, 20, 21, 22, 23, 24, 25, 26, 27, 28, 29, 30, 31, 32, 33, 34, 35, 36, 37, 38, 39, 40, 41, 42, 43, 44, 45, 46, 47, 48, 49, 50, 51, 52, 53, 54, 55, 56, 57, 58, 59, 60, 61, 62, 63, 64, 65, 66, 67, 68, 69, 70, 71, 72, 73, 74, 75, 76, 77, 78. 79, 80, 81, 82, 83, 84, 85, 86, 87, 88, 89, 90, 91, 92, 93, 94, 95, 96, 97, 98, 99, 100, 105, 110, 115, 120, 125, 130, 135, 140, 145, 150, 155, 160, 165, 170, 175, 180, 185, 190, 195,200, 210, 220, 230, 240, 250, 260, 270, 280, 290, 300, 310, 320, 330, 340, 350, 360, 370, 380, 390, 400, 410, 420, 430, 440, 450, 460, 470, 480, 490, 500, 550, 600, 650, 700, 750, 800, 850, 900, 950, or 1000 μg/mL. In some embodiments, the guide RNA and the mRNA are administered at a total amount which results in a plasma Cmax of the iLipid in the human subject is about 0.1 μg/mL to about 1000 μg/mL, about 0.2 μg/mL to about 900 μg/mL, about 0.3 μg/mL to about 800 μg/mL, about 0.4 μg/mL to about 700 μg/mL, about 0.5 μg/mL to about 600 μg/mL, about 0.6 μg/mL to about 500 μg/mL, about 0.7 μg/mL to about 400 μg/mL, about 0.8 μg/mL to about 300 μg/mL, about 0.9 μg/mL to about 200 μg/mL, 1 μg/mL to about 100 μg/mL, about 2 μg/mL to about 90 μg/mL, about 3 μg/mL to about 80 μg/mL, about 4 μg/mL to about 70 μg/mL, about 5 μg/mL to about 60 μg/mL, about 6 μg/mL to about 50 μg/mL, about 7 μg/mL to about 40 μg/mL, about 8 μg/mL to about 30 μg/mL, or about 9 μg/mL to about 20 μg/mL.

[0354] In some embodiments, the guide RNA and the mRNA are administered at a total amount which results in a plasma Cmax of the PEG lipid in the human subject to be about 0.01 μg/mL to about 300 μg/mL, about 0.02 μg/mL to about 250 μg/mL, about 0.03 μg/mL to about 200 μg/mL, about 0.04 μg/mL to about 150 μg/mL, about 0.05 μg/mL to about 100 μg/mL, about 0.06 μg/mL to about 90 μg/mL, about 0.07 μg/mL to about 80 μg/mL, about 0.08 μg/mL to about 70 μg/mL, about 0.09 μg/mL to about 60 μg/mL, about 0.1 μg/mL to about 50 μg/mL, about 0.2 μg/mL to about 45 μg/mL, about 0.3 μg/mL to about 40 μg/mL, about 0.4 μg/mL to about 35 μg/mL, about 0.5 μg/mL to about 30 μg/mL, about 0.6 μg/mL to about 25 μg/mL, about 0.7 μg/mL to about 20 μg/mL, about 0.8 μg/mL to about 19 μg/mL, about 0.9 μg/mL to about 17 μg/mL, about 1 μg/mL to about 15 μg/mL, about 2 μg/mL to about 14 μg/mL, about 3 μg/mL to about 13 μg/mL, about 4 μg/mL to about 12 μg/mL, about 5 μg/mL to about 11 μg/mL, about 6 μg/mL to about 10 μg/mL, or about 7 μg/mL to about 9 μg/mL.

[0355] In some embodiments, the guide RNA and the mRNA are administered at a total amount which results in a plasma Cmax of the mRNA in the human subject to be about 0.01 μg/mL to about 5 μg/mL, about 0.02 μg/mL to about 5 μg/mL, about 0.03 μg/mL to about 5 μg/mL, about 0.04 μg/mL to about 5 μg/mL, about 0.05 μg/mL to about 5 μg/mL, about 0.06 μg/mL to about 5 μg/mL, about 0.07 μg/mL to about 5 μg/mL, about 0.08 μg/mL to about 5 μg/mL, about 0.09 μg/mL to about 5 μg/mL, about 0.1 μg/mL to about 5 μg/mL, about 0.2 μg/mL to about 5 μg/mL, about 0.3 μg/mL to about 5 μg/mL, about 0.4 μg/mL to about 5 μg/mL, about 0.5 μg/mL to about 5 μg/mL, about 0.6 μg/mL to about 5 μg/mL, about 0.7 μg/mL to about 5 μg/mL, about 0.8 μg/mL to about 5 μg/mL, 0.9 μg/mL to about 5 μg/mL, about 1 μg/mL to about 5 μg/mL, about 1.5 μg/mL to about 5 μg/mL, about 2 μg/mL to about 5 μg/mL, about 2.5 μg/mL to about 5 μg/mL, about 3 μg/mL to about 5 μg/mL, about 3.5 μg/mL to about 5 μg/mL, about 4 μg/mL to about 5 μg/mL, or about 4.5 μg/mL to about 5 μg/mL.

[0356] In some embodiments, the guide RNA and the mRNA are administered at a total amount which results in an area under the plasma concentration-time curve (AUC) of the iLipid in the human subject to be about 5 μg×h/mL to about 60000 μg×h/mL, about 10 μg×h/mL to about 55000 μg×h/mL, about 20 μg×h/mL to about 50000 μg×h/mL, about 30 μg×h/mL to about 45000 μg×h/mL, about 40 μg×h/mL to about 40000 μg×h/mL, about 50 μg×h/mL to about 35000 μg×h/mL, about 60 μg×h/mL to about 30000 μg×h/mL, about 70 μg×h/mL to about 25000 μg×h/mL, about 80 μg×h/mL to about 20000 μg×h/mL, about 90 μg×h/mL to about 15000 μg×h/mL, about 100 μg×h/mL to about 10000 μg×h/mL, about 200 μg×h/mL to about 9000 μg×h/mL, about 300 μg×h/mL to about 8000 μg×h/mL, about 400 μg×h/mL to about 7000 μg×h/mL, about 500 μg×h/mL to about 6000 μg×h/mL, about 600 μg×h/mL to about 5000 μg×h/mL, about 700 μg×h/mL to about 4000 μg×h/mL, about 800 μg×h/mL to about 3000 μg×h/mL, or about 900 μg×h/mL to about 2000 μg×h/mL.

[0357] In some embodiments, the guide RNA and the mRNA are administered at a total amount which results in an AUC of the PEG lipid in the human subject to be about 1 μg×h/mL to about 9500 μg×h/mL, about 2 μg×h/mL to about 9000 μg×h/mL, about 3 μg×h/mL to about 8500 μg×h/mL, about 4 μg×h/mL to about 8000 μg×h/mL, about 5 μg×h/mL to about 7500 μg×h/mL, about 6 μg×h/mL to about 7000 μg×h/mL, about 7 μg×h/mL to about 6500 μg×h/mL, about 8 μg×h/mL to about 6000 μg×h/mL, about 9 μg×h/mL to about 5500 μg×h/mL, about 10 μg×h/mL to about 5000 μg×h/mL, about 20 μg×h/mL to about 4500 μg×h/mL, about 30 μg×h/mL to about 4000 μg×h/mL, about 40 μg×h/mL to about 3500 μg×h/mL, about 50 μg×h/mL to about 3000 μg×h/mL, about 60 μg×h/mL to about 2500 μg×h/mL, about 70 μg×h/mL to about 2000 μg×h/mL, about 80 μg×h/mL to about 1500 μg×h/mL, about 90 μg×h/mL to about 1000 μg×h/mL, about 100 μg×h/mL to about 900 μg×h/mL, about 200 μg×h/mL to about 800 μg×h/mL, about 300 μg×h/mL to about 700 μg×h/mL, or about 400 μg×h/mL to about 600 μg×h/mL.

[0358] In some embodiments, the guide RNA and the mRNA are administered at a total amount which results in an AUC of the PEG lipid in the human subject to be about 1 μg×h/mL to about 3000 μg×h/mL, about 10 μg×h/mL to about 2900 μg×h/mL, about 20 μg×h/mL to about 2800 μg×h/mL, about 30 μg×h/mL to about 2700 μg×h/mL, about 40 μg×h/mL to about 2600 μg×h/mL, about 50 μg×h/mL to about 2500 μg×h/mL, about 60 μg×h/mL to about 2400 μg×h/mL, about 70 μg×h/mL to about 2300 μg×h/mL, about 80 μg×h/mL to about 2200 μg×h/mL, about 90 μg×h/mL to about 2100 μg×h/mL, about 100 μg×h/mL to about 2000 μg×h/mL, about 200 μg×h/mL to about 1900 μg×h/mL, about 300 μg×h/mL to about 1800 μg×h/mL, about 400 μg×h/mL to about 1700 μg×h/mL, about 500 μg×h/mL to about 1600 μg×h/mL, 600 μg×h/mL to about 1500 μg×h/mL, 700 μg×h/mL to about 1400 μg×h/mL, 800 μg×h/mL to about 1300 μg×h/mL, 900 μg×h/mL to about 1200 μg×h/mL, or 1000 μg×h/mL to about 1100 μg×h/mL.

[0359] In some embodiments, the guide RNA and the mRNA are administered at a total amount which results in an AUC of the mRNA in the human subject to be about 0.1 μg×h/mL to about 1000 μg×h/mL, about 0.2 μg×h/mL to about 900 μg×h/mL, about 0.3 μg×h/mL to about 800 μg×h/mL, about 0.4 μg×h/mL to about 700 μg×h/mL, about 0.5 μg×h/mL to about 600 μg×h/mL, about 0.6 μg×h/mL to about 500 μg×h/mL, about 0.7 μg×h/mL to about 400 μg×h/mL, about 0.8 μg×h/mL to about 300 μg×h/mL, about 0.9 μg×h/mL to about 200 μg×h/mL, about 1 μg×h/mL to about 100 μg×h/mL, about 2 μg×h/mL to about 90 μg×h/mL, about 3 μg×h/mL to about 80 μg×h/mL, about 4 μg×h/mL to about 60 μg×h/mL, about 5 μg×h/mL to about 50 μg×h/mL, about 6 μg×h/mL to about 40 μg×h/mL, about 7 μg×h/mL to about 30 μg×h/mL, about 8 μg×h/mL to about 20 μg×h/mL, or about 9 μg×h/mL to about 10 μg×h/mL.

[0360] In some embodiments, the guide RNA and the mRNA are administered at the total amount of about 0.01 mg/kg to about 5 mg/kg, about 0.02 mg/kg to about 5 mg/kg, about 0.03 mg/kg to about 5 mg/kg, about 0.04 mg/kg to about 5 mg/kg, about 0.05 mg/kg to about 5 mg/kg, about 0.06 mg/kg to about 5 mg/kg, about 0.07 mg/kg to about 5 mg/kg, about 0.08 mg/kg to about 5 mg/kg, about 0.09 mg/kg to about 5 mg/kg, about 0.1 mg/kg to about 5 mg/kg, about 0.2 mg/kg to about 5 mg/kg, about 0.3 mg/kg to about 5 mg/kg, about 0.4 mg/kg to about 5 mg/kg, about 0.5 mg/kg to about 5 mg/kg, about 0.6 mg/kg to about 5 mg/kg, about 0.7 mg/kg to about 5 mg/kg, about 0.8 mg/kg to about 5 mg/kg, about 0.9 mg/kg to about 5 mg/kg, about 1 mg/kg to about 5 mg/kg, about 1.5 mg/kg to about 5 mg/kg, about 2 mg/kg to about 5 mg/kg, about 2.5 mg/kg to about 5 mg/kg, about 3 mg/kg to about 5 mg/kg, about 3.5 mg/kg to about 5 mg/kg, about 4 mg/kg to about 5 mg/kg, or about 4.5 mg/kg to about 5 mg/kg.

[0361] In some embodiments, the guide RNA and the mRNA are administered at the total amount of about 0.01 mg/kg to about 3 mg/kg, about 0.02 mg/kg to about 3 mg/kg, about 0.03 mg/kg to about 3 mg/kg, about 0.04 mg/kg to about 3 mg/kg, about 0.05 mg/kg to about 3 mg/kg, about 0.06 mg/kg to about 3 mg/kg, about 0.07 mg/kg to about 3 mg/kg, about 0.08 mg/kg to about 3 mg/kg, about 0.09 mg/kg to about 3 mg/kg, about 0.1 mg/kg to about 3 mg/kg, about 0.2 mg/kg to about 3 mg/kg, about 0.3 mg/kg to about 3 mg/kg, about 0.4 mg/kg to about 3 mg/kg, about 0.5 mg/kg to about 3 mg/kg, about 0.6 mg/kg to about 3 mg/kg, about 0.7 mg/kg to about 3 mg/kg, about 0.8 mg/kg to about 3 mg/kg, about 0.9 mg/kg to about 3 mg/kg, about 1 mg/kg to about 3 mg/kg, about 1.5 mg/kg to about 3 mg/kg, about 2 mg/kg to about 3 mg/kg, or about 2.5 mg/kg to about 3 mg/kg.

[0362] In some embodiments, the guide RNA and the mRNA are administered at the total amount of about 0.01 mg/kg to about 2 mg/kg, about 0.02 mg/kg to about 2 mg/kg, about 0.03 mg/kg to about 2 mg/kg, about 0.04 mg/kg to about 2 mg/kg, about 0.05 mg/kg to about 2 mg/kg, about 0.06 mg/kg to about 2 mg/kg, about 0.07 mg/kg to about 2 mg/kg, about 0.08 mg/kg to about 2 mg/kg, about 0.09 mg/kg to about 2 mg/kg, about 0.1 mg/kg to about 2 mg/kg, about 0.2 mg/kg to about 2 mg/kg, about 0.3 mg/kg to about 2 mg/kg, about 0.4 mg/kg to about 2 mg/kg, about 0.5 mg/kg to about 2 mg/kg, about 0.6 mg/kg to about 2 mg/kg, about 0.7 mg/kg to about 2 mg/kg, about 0.8 mg/kg to about 2 mg/kg, about 0.9 mg/kg to about 2 mg/kg, about 1 mg/kg to about 2 mg/kg, about 1.1 mg/kg to about 2 mg/kg, about 1.2 mg/kg to about 2 mg/kg, about 1.3 mg/kg to about 2 mg/kg, about 1.4 mg/kg to about 2 mg/kg, about 1.5 mg/kg to about 2 mg/kg, about 1.6 mg/kg to about 2 mg/kg, about 1.7 mg/kg to about 2 mg/kg, about 1.8 mg/kg to about 2 mg/kg, or about 1.9 mg/kg to about 2 mg/kg.

[0363] In some embodiments, the guide RNA and the mRNA are administered at the total amount of about 0.01 mg/kg to about 1.5 mg/kg, about 0.02 mg/kg to about 1.5 mg/kg, about 0.03 mg/kg to about 1.5 mg/kg, about 0.04 mg/kg to about 1.5 mg/kg, about 0.05 mg/kg to about 1.5 mg/kg, about 0.06 mg/kg to about 1.5 mg/kg, about 0.07 mg/kg to about 1.5 mg/kg, about 0.08 mg/kg to about 1.5 mg/kg, about 0.09 mg/kg to about 1.5 mg/kg, about 0.1 mg/kg to about 1.5 mg/kg, about 0.2 mg/kg to about 1.5 mg/kg, about 0.3 mg/kg to about 1.5 mg/kg, about 0.4 mg/kg to about 1.5 mg/kg, about 0.5 mg/kg to about 1.5 mg/kg, about 0.6 mg/kg to about 1.5 mg/kg, about 0.7 mg/kg to about 1.5 mg/kg, about 0.8 mg/kg to about 1.5 mg/kg, about 0.9 mg/kg to about 1.5 mg/kg, about 1 mg/kg to about 1.5 mg/kg, about 1.1 mg/kg to about 1.5 mg/kg, about 1.2 mg/kg to about 1.5 mg/kg, about 1.3 mg/kg to about 1.5 mg/kg, or about 1.4 mg/kg to about 1.5 mg/kg.

[0364] In some embodiments, the guide RNA and the mRNA are administered at the total amount of about 0.01 mg/kg to about 1.25 mg/kg, about 0.02 mg/kg to about 1.25 mg/kg, about 0.03 mg/kg to about 1.25 mg/kg, about 0.04 mg/kg to about 1.25 mg/kg, about 0.05 mg/kg to about 1.25 mg/kg, about 0.06 mg/kg to about 1.25 mg/kg, about 0.07 mg/kg to about 1.25 mg/kg, about 0.08 mg/kg to about 1.25 mg/kg, about 0.09 mg/kg to about 1.25 mg/kg, about 0.1 mg/kg to about 1.25 mg/kg, about 0.2 mg/kg to about 1.25 mg/kg, about 0.3 mg/kg to about 1.25 mg/kg, about 0.4 mg/kg to about 1.25 mg/kg, about 0.5 mg/kg to about 1.25 mg/kg, about 0.6 mg/kg to about 1.25 mg/kg, about 0.7 mg/kg to about 1.25 mg/kg, about 0.8 mg/kg to about 1.25 mg/kg, about 0.9 mg/kg to about 1.25 mg/kg, about 1 mg/kg to about 1.25 mg/kg, about 1.1 mg/kg to about 1.25 mg/kg, or about 1.2 mg/kg to about 1.25 mg/kg.

[0365] In some embodiments, the guide RNA and the mRNA are administered at the total amount of about 0.01 mg/kg to about 1 mg/kg, about 0.02 mg/kg to about 1 mg/kg, about 0.03 mg/kg to about 1 mg/kg, about 0.04 mg/kg to about 1 mg/kg, about 0.05 mg/kg to about 1 mg/kg, about 0.06 mg/kg to about 1 mg/kg, about 0.07 mg/kg to about 1 mg/kg, about 0.08 mg/kg to about 1 mg/kg, about 0.09 mg/kg to about 1 mg/kg, about 0.1 mg/kg to about 1 mg/kg, about 0.2 mg/kg to about 1 mg/kg, about 0.3 mg/kg to about 1 mg/kg, about 0.4 mg/kg to about 1 mg/kg, about 0.5 mg/kg to about 1 mg/kg, about 0.6 mg/kg to about 1 mg/kg, about 0.7 mg/kg to about 1 mg/kg, about 0.8 mg/kg to about 1 mg/kg, or about 0.9 mg/kg to about 1 mg/kg.

[0366] In some embodiments, the guide RNA and the mRNA are administered at the total amount of about 0.01 mg/kg to about 0.9 mg/kg, about 0.02 mg/kg to about 0.9 mg/kg, about 0.03 mg/kg to about 0.9 mg/kg, about 0.04 mg/kg to about 0.9 mg/kg, about 0.05 mg/kg to about 0.9 mg/kg, about 0.06 mg/kg to about 0.9 mg/kg, about 0.07 mg/kg to about 0.9 mg/kg, about 0.08 mg/kg to about 0.9 mg/kg, about 0.09 mg/kg to about 0.9 mg/kg, about 0.1 mg/kg to about 0.9 mg/kg, about 0.2 mg/kg to about 0.9 mg/kg, about 0.3 mg/kg to about 0.9 mg/kg, about 0.4 mg/kg to about 0.9 mg/kg, about 0.5 mg/kg to about 0.9 mg/kg, about 0.6 mg/kg to about 0.9 mg/kg, about 0.7 mg/kg to about 0.9 mg/kg, or about 0.8 mg/kg to about 0.9 mg/kg.

[0367] In some embodiments, the guide RNA and the mRNA are administered at the total amount of about 0.01 mg/kg to about 0.8 mg/kg, about 0.02 mg/kg to about 0.8 mg/kg, about 0.03 mg/kg to about 0.8 mg/kg, about 0.04 mg/kg to about 0.8 mg/kg, about 0.05 mg/kg to about 0.8 mg/kg, about 0.06 mg/kg to about 0.8 mg/kg, about 0.07 mg/kg to about 0.8 mg/kg, about 0.08 mg/kg to about 0.8 mg/kg, about 0.09 mg/kg to about 0.8 mg/kg, about 0.1 mg/kg to about 0.8 mg/kg, about 0.2 mg/kg to about 0.8 mg/kg, about 0.3 mg/kg to about 0.8 mg/kg, about 0.4 mg/kg to about 0.8 mg/kg, about 0.5 mg/kg to about 0.8 mg/kg, about 0.6 mg/kg to about 0.8 mg/kg, or about 0.7 mg/kg to about 0.8 mg/kg.

[0368] In some embodiments, the guide RNA and the mRNA are administered at the total amount of about 0.01 mg/kg to about 0.6 mg/kg, about 0.02 mg/kg to about 0.6 mg/kg, about 0.03 mg/kg to about 0.6 mg/kg, about 0.04 mg/kg to about 0.6 mg/kg, about 0.05 mg/kg to about 0.6 mg/kg, about 0.06 mg/kg to about 0.6 mg/kg, about 0.07 mg/kg to about 0.6 mg/kg, about 0.08 mg/kg to about 0.6 mg/kg, about 0.09 mg/kg to about 0.6 mg/kg, about 0.1 mg/kg to about 0.6 mg/kg, about 0.2 mg/kg to about 0.6 mg/kg, about 0.3 mg/kg to about 0.6 mg/kg, about 0.4 mg/kg to about 0.6 mg/kg, or about 0.5 mg/kg to about 0.6 mg/kg.

[0369] In some embodiments, the guide RNA and the mRNA are administered at the total amount of about 0.01 mg/kg to about 0.3 mg/kg, about 0.02 mg/kg to about 0.3 mg/kg, about 0.03 mg/kg to about 0.3 mg/kg, about 0.04 mg/kg to about 0.3 mg/kg, about 0.05 mg/kg to about 0.3 mg/kg, about 0.06 mg/kg to about 0.3 mg/kg, about 0.07 mg/kg to about 0.3 mg/kg, about 0.08 mg/kg to about 0.3 mg/kg, about 0.09 mg/kg to about 0.3 mg/kg, about 0.1 mg/kg to about 0.3 mg/kg, or about 0.2 mg/kg to about 0.3 mg/kg.

[0370] In some embodiments, the guide RNA and the mRNA are administered at the total amount of about 0.01 mg/kg, about 0.015 mg/kg, about 0.02 mg/kg, about 0.025 mg/kg, about 0.03 mg/kg, about 0.035 mg/kg, about 0.04 mg/kg, about 0.045 mg/kg, about 0.05 mg/kg, about 0.055 mg/kg, about 0.06 mg/kg, about 0.065 mg/kg, about 0.07 mg/kg, about 0.075 mg/kg, about 0.08 mg/kg, about 0.085 mg/kg, about 0.09 mg/kg, about 0.095 mg/kg, about 0.1 mg/kg, about 0.15 mg/kg, about 0.2 mg/kg, about 0.25 mg/kg, about 0.3 mg/kg, about 0.35 mg/kg, about 0.4 mg/kg, about 0.45 mg/kg, about 0.5 mg/kg, about 0.55 mg/kg, about 0.6 mg/kg, about 0.65 mg/kg, about 0.7 mg/kg, about 0.75 mg/kg, about 0.8 mg/kg, about 0.85 mg/kg, about 0.9 mg/kg, about 0.95 mg/kg, about 1 mg/kg, about 1.05 mg/kg, about 1.1 mg/kg, about 1.15 mg/kg, about 1.2 mg/kg, about 1.25 mg/kg, about 1.3 mg/kg, about 1.35 mg/kg, about 1.4 mg/kg, about 1.45 mg/kg, about 1.5 mg/kg, about 1.55 mg/kg, about 1.6 mg/kg, about 1.65 mg/kg, about 1.7 mg/kg, about 1.75 mg/kg, about 1.8 mg/kg, about 1.85 mg/kg, about 1.9 mg/kg, about 1.95 mg/kg, about 2 mg/kg, about 2.1 mg/kg, about 2.2 mg/kg, about 2.3 mg/kg, about 2.4 mg/kg, about 2.5 mg/kg, about 2.6 mg/kg, about 2.7 mg/kg, about 2.8 mg/kg, about 2.9 mg/kg, about 3 mg/kg, about 3.1 mg/kg, about 3.2 mg/kg, about 3.3 mg/kg, about 3.4 mg/kg, about 3.5 mg/kg, about 3.6 mg/kg, about 3.7 mg/kg, about 3.8 mg/kg, about 3.9 mg/kg, about 4 mg/kg, about 4.1 mg/kg, about 4.2 mg/kg, about 4.3 mg/kg, about 4.4 mg/kg, about 4.5 mg/kg, about 4.6 mg/kg, about 4.7 mg/kg, about 4.8 mg/kg, about 4.9 mg/kg, or about 5 mg/kg.

[0371] In some embodiments, the guide RNA and the mRNA are administered at a total amount of about 0.001 mg/kg to about 1000 mg/kg, about 0.002 mg/kg to about 950 mg/kg, about 0.003 mg/kg to about 900 mg/kg, about 0.004 mg/kg to about 850 mg/kg, about 0.005 mg/kg to about 800 mg/kg, about 0.006 mg/kg to about 750 mg/kg, about 0.007 mg/kg to about 700 mg/kg, about 0.008 mg/kg to about 650 mg/kg, about 0.009 mg/kg to about 600 mg/kg, about 0.01 mg/kg to about 500 mg/kg, about 0.02 mg/kg to about 500 mg/kg, about 0.03 mg/kg to about 450 mg/kg, about 0.04 mg/kg to about 400 mg/kg, about 0.05 mg/kg to about 350 mg/kg, about 0.06 mg/kg to about 300 mg/kg, about 0.07 mg/kg to about 250 mg/kg, about 0.08 mg/kg to about 200 mg/kg, about 0.09 mg/kg to about 150 mg/kg, about 0.1 mg/kg to about 100 mg/kg, about 0.2 mg/kg to about 90 mg/kg, about 0.3 mg/kg to about 85 mg/kg, about 0.4 mg/kg to about 80 mg/kg, about 0.5 mg/kg to about 75 mg/kg, about 0.6 mg/kg to about 70 mg/kg, about 0.7 mg/kg to about 65 mg/kg, about 0.8 mg/kg to about 60 mg/kg, about 0.9 mg/kg to about 55 mg/kg, about 1 mg/kg to about 50 mg/kg, about 2 mg/kg to about 45 mg/kg, about 3 mg/kg to about 40 mg/kg, about 4 mg/kg to about 35 mg/kg, about 5 mg/kg to about 30 mg/kg, about 6 mg/kg to about 25 mg/kg, about 7 mg/kg to about 20 mg/kg, about 8 mg/kg to about 15 mg/kg, or about 9 mg/kg to about 10 mg/kg.

[0372] In some embodiments, the guide RNA and the mRNA are administered at a total amount of about 0.005 mg/kg to about 1000 mg/kg, about 0.01 mg/kg to about 1000 mg/kg, about 0.05 mg/kg to about 1000 mg/kg, about 0.1 mg/kg to about 1000 mg/kg, about 0.5 mg/kg to about 1000 mg/kg, about 1 mg/kg to about 1000 mg/kg, about 5 mg/kg to about 1000 mg/kg, about 10 mg/kg to about 1000 mg/kg, about 20 mg/kg to about 1000 mg/kg, about 30 mg/kg to about 1000 mg/kg, about 40 mg/kg to about 1000 mg/kg, about 50 mg/kg to about 1000 mg/kg, about 60 mg/kg to about 1000 mg/kg, about 70 mg/kg to about 1000 mg/kg, about 80 mg/kg to about 1000 mg/kg, about 90 mg/kg to about 1000 mg/kg, about 100 mg/kg to about 1000 mg/kg, about 150 mg/kg to about 1000 mg/kg, about 200 mg/kg to about 1000 mg/kg, about 250 mg/kg to about 1000 mg/kg, about 300 mg/kg to about 1000 mg/kg, about 350 mg/kg to about 1000 mg/kg, about 400 mg/kg to about 1000 mg/kg, about 450 mg/kg to about 1000 mg/kg, about 500 mg/kg to about 1000 mg/kg, about 550 mg/kg to about 1000 mg/kg, about 600 mg/kg to about 1000 mg/kg, about 650 mg/kg to about 1000 mg/kg, about 700 mg/kg to about 1000 mg/kg, about 750 mg/kg to about 1000 mg/kg, about 800 mg/kg to about 1000 mg/kg, about 850 mg/kg to about 1000 mg/kg, about 900 mg/kg to about 1000 mg/kg, or about 950 mg/kg to about 1000 mg/kg.

[0373] In some embodiments, the guide RNA and the mRNA are administered at a total amount of about 0.001 mg/kg to about 950 mg/kg, about 0.001 mg/kg to about 900 mg/kg, about 0.001 mg/kg to about 850 mg/kg, about 0.001 mg/kg to about 800 mg/kg, about 0.001 mg/kg to about 750 mg/kg, about 0.001 mg/kg to about 700 mg/kg, about 0.001 mg/kg to about 650 mg/kg, about 0.001 mg/kg to about 600 mg/kg, about 0.001 mg/kg to about 550 mg/kg, about 0.001 mg/kg to about 500 mg/kg, about 0.001 mg/kg to about 450 mg/kg, about 0.001 mg/kg to about 400 mg/kg, about 0.001 mg/kg to about 350 mg/kg, about 0.001 mg/kg to about 300 mg/kg, about 0.001 mg/kg to about 250 mg/kg, about 0.001 mg/kg to about 200 mg/kg, about 0.001 mg/kg to about 150 mg/kg, about 0.001 mg/kg to about 100 mg/kg, about 0.001 mg/kg to about 90 mg/kg, about 0.001 mg/kg to about 80 mg/kg, about 0.001 mg/kg to about 70 mg/kg, about 0.001 mg/kg to about 60 mg/kg, about 0.001 mg/kg to about 50 mg/kg, about 0.001 mg/kg to about 40 mg/kg, about 0.001 mg/kg to about 30 mg/kg, about 0.001 mg/kg to about 20 mg/kg, about 0.001 mg/kg to about 10 mg/kg, about 0.001 mg/kg to about 9 mg/kg, about 0.001 mg/kg to about 8 mg/kg, about 0.001 mg/kg to about 7 mg/kg, about 0.001 mg/kg to about 6 mg/kg, about 0.001 mg/kg to about 5 mg/kg, about 0.001 mg/kg to about 4 mg/kg, about 0.001 mg/kg to about 3 mg/kg, about 0.001 mg/kg to about 2 mg/kg, about 0.001 mg/kg to about 1 mg/kg, about 0.001 mg/kg to about 0.9 mg/kg, about 0.001 mg/kg to about 0.8 mg/kg, about 0.001 mg/kg to about 0.7 mg/kg, about 0.001 mg/kg to about 0.6 mg/kg, about 0.001 mg/kg to about 0.5 mg/kg, about 0.001 mg/kg to about 0.4 mg/kg, about 0.001 mg/kg to about 0.3 mg/kg, about 0.001 mg/kg to about 0.2 mg/kg, about 0.001 mg/kg to about 0.1 mg/kg, about 0.001 mg/kg to about 0.09 mg/kg, about 0.001 mg/kg to about 0.08 mg/kg, about 0.001 mg/kg to about 0.07 mg/kg, about 0.001 mg/kg to about 0.06 mg/kg, about 0.001 mg/kg to about 0.05 mg/kg, about 0.001 mg/kg to about 0.04 mg/kg, about 0.001 mg/kg to about 0.03 mg/kg, about 0.001 mg/kg to about 0.02 mg/kg, about 0.001 mg/kg to about 0.01 mg/kg, about 0.001 mg/kg to about 0.009 mg/kg, about 0.001 mg/kg to about 0.008 mg/kg, about 0.001 mg/kg to about 0.007 mg/kg, about 0.001 mg/kg to about 0.006 mg/kg, about 0.001 mg/kg to about 0.005 mg/kg, about 0.001 mg/kg to about 0.004 mg/kg, about 0.001 mg/kg to about 0.003 mg/kg, or about 0.001 mg/kg to about 0.002 mg/kg.

### Lipid Nanoparticle (LNP)

[0374] The LNPs described herein can be designed for one or more specific applications or targets. The elements of a nanoparticle (LNP) composition or a composition can be selected based on a particular application or target, and/or based on the efficacy, toxicity, expense, ease of use, and availability. Similarly, the particular formulation of a nanoparticle composition is a composition comprising one or more described lipids. may be selected for the particular application or target. Suitable phosphate charge neutralizers to be used in formulations include, but are not limited to, Spermidine and 1,3-propanediamine.

[0375] In some embodiments, LNPs are prepared in accordance with the methods described in Conway, A. et al. 2019 Mol. Ther. 27, 866-877, and Villiger, L. et al 2021 Nat. Biomed. Eng. 5, 179-18, which are incorporated by reference. In some embodiments, LNPs are composed of an amino lipid, a monomethoxypolyethylene glycol (or methoxypoluyethyle glycol) of average molecular weight 2000 Da conjugated to a lipid called PEG-Lipid, cholesterol and 1,2-distearoyl-sn-glycero-3-phosphocholine (DSPC). In some embodiments, LNPs are composed of proprietary ionizable cationic lipid, 1,2-distearoyl-sn-glycero-3-phosphocholine, cholesterol, an ionizable amino lipid, and a PEG-lipid.

[0376] In some embodiments, LNPs have an average hydrodynamic diameter of about 30-about 160, about 35-about 160, about 40-about 160, about 45-about 160, about 50-about 160, about 55-about 160, about 60-about 160, about 65-about 160, about 70-about 160, about 75 about 160, about 80-about 160, about 85-about 160, about 90-about 160, about 95-about 160, about 100-about 160, about 105-about 160, about 110-about 160, about 115-about 160, about 120-about 160, about 125-about 160, about 130-about 160, about 135-about 160, about 140-about 160, about 145-about 160, about 150-about 160, about 30-about 155, about 30-about 150, about 30-about 145, about 30-about 140, about 30-about 135, about 30-about 130, about 30-about 125, about 30-about 120, about 30-about 115, about 30-about 110, about 30-about 105, about 30-about 100, about 30-about 95, about 30-about 90, about 30-about 85, about 30-about 80, about 30-about 75, about 30-about 70, about 30-about 65, about 30-about 60, about 30-about 55, about 30-about 50, about 30-about 45, about 30-about 40, about 30-about 45, about 35-about 45, about 35-about 50, about 40-about 50, about 40-about 55, about 45-about 55, about 45-about 60, about 50-about 60, about 50-about 65, about 55-about 60, about 55-about 65, about 55-about 70, about 60-about 70, about 60-about 75, about 65-about 75, about 65-about 80, about 70-about 80, about 70-about 85, about 75-about 85, about 75-about 90, about 80-about 90, about 80-about 95, about 85-about 95, about 85-about 100, about 90-about 100, about 90-about 105, about 95-about 105, about 95-about 110, about 100-about 110, about 100-about 115, about 105-about 115, about 105-about 120, about 110-about 120, about 110-about 125, about 115-about 125, about 115-about 130, about 120-about 130, about 120-about 135, about 125-about 135, about 125-about 140, about 130-about 140, about 130-about 145, about 35-about 140, about 45-about 130, about 55-about 120, about 65-about 110, about 75-about 100, or about 85-about 90 nm.

[0377] In some embodiments, LNPs comprise about 1-about 97, about 5-about 97, about 10-about 97, about 15-about 97, about 20-about 97, about 25-about 97, about 30-about 97, about 35-about 97, about 40-about 97, about 45-about 97, about 50-about 97, about 55-about 97, about 60-about 97, about 65-about 97, about 70-about 97, about 75-about 97, about 80-about 97, about 1-about 95, about 1-about 90, about 1-about 85, about 1-about 80, about 1-about 75, about 1-about 70, about 1-about 65, about 1-about 60, about 1-about 55, about 1-about 50, about 1-about 45, about 1-about 40, about 1-about 35, about 1-about 30, about 1-about 25, about 1-about 20, about 1-about 15, about 1-about 10, about 10-about 30, about 10-about 35, about 15-about 35, about 15-about 40, about 20-about 40, about 20-about 45, about 25-about 45, about 25-about 50, about 30-about 50, about 30-about 55, about 35-about 55, about 35-about 60, about 40-about 60, about 40-about 65, about 45-about 65, about 45-about 70, about 50-about 70, about 50-about 75, about 55-about 75, about 55-about 80, or about 60-about 80% of amino lipids (in mol %).

[0378] In some embodiments, LNPs comprise about 1-about 40, about 1-about 38, about 1-about 36, about 1-about 34, about 1-about 32, about 1-about 30, about 1-about 28, about 1-about 26, about 1-about 24, about 1-about 22, about 1-about 20, about 1-about 18, about 1-about 16, about 1-about 14, about 1-about 12, about 1-about 10, about 1-about 8, about 1-about 6, about 1-about 4, about 1-about 2, about 2-about 40, about 4-about 40, about 6-about 40, about 8-about 40, about 10-about 40, about 12-about 40, about 14-about 40, about 16-about 40, about 18-about 40, about 20-about 40, about 22-about 40, about 24-about 40, about 26-about 40, about 28-about 40, about 30-about 40, about 32-about 40, about 34-about 40, about 36-about 40, about 38-about 40, about 2-about 35, about 2-about 30, about 2 about 25, about 2-about 20, about 2-about 15, about 2-about 10, about 2-about 8, about 2-about 6, or about 2-about 4% DSPC (in mol %).

[0379] In some embodiments, LNPs comprise about 1-about 20, about 1-about 19, about 1-about 18, about 1-about 17, about 1-about 16, about 1-about 15, about 1-about 14, about 1-about 13, about 1-about 12, about 1-about 11, about 1-about 10, about 1-about 9, about 1-about 8, about 1-about 7, about 1-about 6, about 1-about 5, about 1-about 4, about 1-about 3, about 2-about 6, about 3-about 7, about 4-about 8, about 5-about 9, about 6-about 10, about 7-about 11, about 8-about 12, about 9-about 13, about 10-about 14, about 11-about 15, about 12-about 16, about 13-about 17, about 14-about 18, about 15-about 19, or about 16-about 20% PEG-Lipid (in mol %).

[0380] In some embodiments, LNPs comprise about 1-about 97, about 5-about 97, about 10-about 97, about 15-about 97, about 20-about 97, about 25-about 97, about 30-about 97, about 35-about 97, about 40-about 97, about 45-about 97, about 50-about 97, about 55-about 97, about 60-about 97, about 65-about 97, about 70-about 97, about 75-about 97, about 80-about 97, about 1-about 95, about 1-about 90, about 1-about 85, about 1-about 80, about 1-about 75, about 1-about 70, about 1-about 65, about 1-about 60, about 1-about 55, about 1-about 50, about 1-about 45, about 1-about 40, about 1-about 35, about 1-about 30, about 1-about 25, about 1-about 20, about 1-about 15, about 1-about 10, about 10-about 30, about 10-about 35, about 15-about 35, about 15-about 40, about 20-about 40, about 20-about 45, about 25-about 45, about 25-about 50, about 30-about 50, about 30-about 55, about 35-about 55, about 35-about 60, about 40-about 60, about 40-about 65, about 45-about 65, about 45-about 70, about 50-about 70, about 50-about 75, about 55-about 75, about 55-about 80, or about 60-about 80% of cholesterol (in mol %).

[0381] In some embodiments, LNPs comprise about 1-about 97, 5-about 97, 10-about 97, 15 about 97, 20-about 97, 25-about 97, 30-about 97, 35-about 97, 40-about 97, 45-about 97, 50-about 97, 55-about 97, 60-about 97, 65-about 97, 70-about 97, 75-about 97, 80-about 97, 1-about 95, 1-about 90, 1-about 85, 1-about 80, 1-about 75, 1-about 70, 1-about 65, 1-about 60, 1-about 55, 1-about 50, 1-about 45, 1-about 40, 1-about 35, 1-about 30, 1-about 25, 1-about 20, 1-about 15, 1-about 10, 10-about 30, 10-about 35, 15-about 35, 15-about 40, 20-about 40, 20-about 45, 25-about 45, 25-about 50, 30-about 50, 30-about 55, 35-about 55, 35-about 60, 40-about 60, 40-about 65, 45-about 65, 45-about 70, 50-about 70, 50-about 75, 55-about 75, 55-about 80, or 60-about 80% of amino lipids; 1-about 40, 1-about 38, 1-about 36, 1-about 34, 1-about 32, 1-about 30, 1-about 28, 1-about 26, 1-about 24, 1-about 22, 1-about 20, 1-about 18, 1-about 16, 1-about 14, 1-about 12, 1-about 10, 1-about 8, 1-about 6, 1-about 4, 1-about 2, 2-about 40, 4-about 40, 6-about 40, 8-about 40, 10-about 40, 12-about 40, 14-about 40, 16-about 40, 18-about 40, 20-about 40, 22-about 40, 24-about 40, 26-about 40, 28-about 40, 30-about 40, 32-about 40, 34-about 40, 36-about 40, 38-about 40, 2-about 35, 2-about 30, 2-about 25, 2-about 20, 2-about 15, 2-about 10, 2-about 8, 2-about 6, or 2-about 4% DSPC; 1-about 20, 1-about 19, 1-about 18, 1-about 17, 1-about 16, 1-about 15, 1-about 14, 1-about 13, 1-about 12, 1-about 11, 1-about 10, 1-about 9, 1-about 8, 1-about 7, 1-about 6, 1-about 5, 1 about 4, 1-about 3, 2-about 6, 3-about 7, 4-about 8, 5-about 9, 6-about 10, 7-about 11, 8-about 12, 9-about 13, 10-about 14, 11-about 15, 12-about 16, 13-about 17, 14-about 18, 15-about 19, and about 16-about 20% PEG-Lipid, with the balance being cholesterol (all in mol %).

### Amino Lipid

[0382] Described herein are LNP compositions comprising an amino lipid, a phospholipid, a PEGlipid, a cholesterol or a derivative thereof, a payload, or any combination thereof. In some embodiments, the LNP composition comprises an amino lipid. In one aspect, disclosed herein is an amino lipid having the structure of. Formula (I), or a pharmaceutically acceptable salt or solvate thereof,

[chemical structure]

[0383] wherein
[0384] each of R¹ and R² is independently C₇-C₂₂ alkyl, C₇-C₂₂ alkenyl, C₃-C₈ cycloalkyl, —C₂-C₁₀ alkylene-L-R⁶, or

[chemical structure]

wherein each of the alkyl, alkylene, alkenyl, and cycloalkyl is independently substituted or unsubstituted;
[0385] each of X, Y, and Z is independently —C(═O)NR⁴—, —NR⁴C(═O)—, —C(═O)O—, —OC(═O)—, —OC(═O)O—, —NR⁴C(═O)O—, —OC(═O)NR⁴—, —NR⁴C(═O)NR⁴—, —NR⁴C(═NR⁴)NR⁴—, —C(═S)NR⁴—, —NR⁴C(═S)—, —C(═O)O—, —OC(═S)—, OC(═S)O—, —NR⁴C(═S)O—, —OC(═S)NR⁴—, —NR⁴C(═S)NR⁴—, —C(═O)S—, —SC(═O)—, —OC(═O)S—, —NR⁴C(═O)S—, —SC(═O)NR⁴—, —C(═S)S—, —SC(═S)—, —SC(═S)O—, —NR⁴C(═S)S—, —SC(═S)NR⁴—, —C(═S)S—, —SC(═S)—, —SC(═O)S—, —SC(═S)S—, —NR⁴C(═S)S—, —SC(═S)NR⁴—O, S, or a bond;
[0386] each of L is independently —C(═O)NR⁴—, —NR⁴C(═O)—, —C(═O)O—, —OC(═O)O—, —NR⁴C(═O)O—, —OC(═O)NR⁴—, —NR⁴C(═O)NR⁴—, —NR⁴C(═NR⁴)NR⁴—, —C(═S)NR⁴—, —NR⁴C(═S)—, —C(═O)O—, —OC(═S)—, OC(═S)O—, —NR⁴C(═S)O—, —OC(═S)NR⁴—, —NR⁴C(═S)NR⁴—, —C(═O)S—, —SC(═O)—, —OC(═O)S—, —NR⁴C(═O)S—, —SC(═O)NR⁴—, —C(═S)S—, —SC(═S)—, —SC(═S)O—, —NR⁴C(═S)S—, —SC(═S)NR⁴—, —C(═S)S—, —SC(═S)—, —SC(═O)S—, —SC(═S)S—, —NR⁴C(═S)S—, —SC(═S)NR⁴—, O, S, —C₁-C₁₀ alkylene-O—, —C₁-C₁₀ alkylene-C(═O)O—, —C₁-C₁₀ alkylene-OC(═O)—, or a bond, wherein the alkylene is substituted or unsubstituted;
[0387] R³ is —C₀-C₁₀ alkylene-NR⁷R⁸, —C₀-C₁₀ alkylene-heterocycloalkyl, or —C₀-C₁₀ alkylene-heterocycloaryl,
[0388] wherein the alkylene, heterocycloalkyl and heterocycloaryl is independently substituted or unsubstituted; each of R⁴ is independently hydrogen or substituted or unsubstituted C₁-C₆ alkyl;
[0389] R⁵ is hydrogen or substituted or unsubstituted C₁-C₆ alkyl;
[0390] each of R⁶ is independently substituted or unsubstituted C₃-C₂₂ alkyl or substituted or unsubstituted C₃-C₂₂ alkenyl;
[0391] each of R⁷ and R⁸ is independently hydrogen or substituted or unsubstituted C₁-C₆ alkyl, or R⁷ and R⁸ taken together with the nitrogen to which they are attached form a substituted or unsubstituted C₂-C₆ heterocyclyl;
[0392] p is an integer selected from 1 to 10; and
[0393] each of n, m, and q is independently 0, 1, 2, 3, 4, or 5.

[0394] In some embodiments of Formula (I), if the structure carries more than one asymmetric C-atom, each asymmetric C-atom independently represents racemic, chirally pure R and/or chirally pure S isomer, or a combination thereof.

[0395] In some embodiments, each of n, in, and q in Formula (I) is independently 0, 1, 2, or 3. In some embodiments, each of n, m, and q in Formula (I) is 1.

[0396] In some embodiments, the compound of Formula (1) has a structure of Formula (Ia), or a pharmaceutically acceptable salt or pharmaceutically acceptable solvate thereof:

[chemical structure]

[0397] wherein
[0398] each of R¹ and R² is independently C₇-C₂₂ alkyl, C₇-C₂₂ alkenyl, C₃-C₈ cycloalkyl, —C₂-C₁₀ alkylene-L-R⁶, or

[chemical structure]

wherein each of the alkyl, alkylene, alkenyl, and cycloalkyl is independently substituted or unsubstituted;
[0399] each of X, Y, and Z is independently C(═O)NR⁴—, —NR⁴C(D)-, —C(═O)O—, —OC(═O)—, —OC(═O)O—, —NR⁴C(═O)O—, —OC(═O)NR⁴—, —NR⁴C═O)NR⁴—, —NR⁴C(═NR⁴)NR⁴—, —C(═S)NR⁴—, —NR⁴C(═S)—, —C(E)O—, —OC(═S)—, OC(═S)O—, —NR⁴C(═S)O—, —OC(═S)NR⁴—, —NR⁴C(═S)NR⁴—, —C(═O)S—, —SC(═O)—, —OC(═O)S—, —NR⁴C(═O)S—, —SC(═O)NR⁴—, —C(═S)S—, —SC(═S)—, —SC(═S)O—, —NR⁴C(═S)S—, —SC(═S)NR⁴—, —C(═S)S—, —SC(═S)—, —SC(═O)S—, —SC(═S)S—, —NR⁴C(═S)S—, —SC(═S)NR⁴—, O, S, —C₁-C₁₀ alkylene-O—, or a bond, wherein the alkylene is substituted or unsubstituted;
[0400] each of L is independently —C(═O)NR⁴—, —NR⁴C(═O)—, —C(═O)O—, —OC(═O)—, —OC(═O)O—, —NR⁴C(═O)O—, —OC(═O)NR⁴—, —NR⁴C(═O)NR⁴—, —NR⁴C(═NR⁴)NR⁴—, —C(═S)NR⁴—, —NR⁴C(═S)—, —C(═O)O—, —OC(═S)—, OC(═S)O—, —NR⁴C(═S)O—, —OC(═S)NR⁴—, —NR⁴C(═S)NR⁴—, —C(═O)S—, —SC(═O)—, —OC(═O)S—, —NR⁴C(═O)S—, —SC(═O)NR⁴—, —C(═S)S—, —SC(═S)—, —SC(═S)O—, —NR⁴C(═S)S—, —SC(═S)NR⁴—, —C(═S)S—, —SC(═S)—, —SC(═O)S—, —SC(═S)S—, —NR⁴C(═S)S—, —SC(═S)NR⁴—, O, S, —C₁-C₁₀ alkylene-O—, —C₁-C₁₀ alkylene-C(═O)O—, —C₁-C₁₀ alkylene —OC(═O)—, or a bond, wherein the alkylene is substituted or unsubstituted;
[0401] R³ is —C₀-C₁₀ alkylene-NR⁷R⁸, —C₀-C₁₀ alkylene-heterocycloalkyl, or —C₀-C₁₀ alkylene-heterocyclowyl, wherein the alkylene, heterocycloalkyl and heterocycloaryl is independently substituted or unsubstituted;
[0402] each of R⁴ is independently hydrogen or substituted or unsubstituted C₁-C₆ alkyl;
[0403] R⁵ is hydrogen or substituted or unsubstituted C₁-C₆ alkyl;
[0404] each of R⁶ is independently substituted or unsubstituted C₃-C₂₂ alkyl or substituted or unsubstituted C₃-C₂₂ alkenyl;
[0405] each of R⁷ and R⁸ is independently hydrogen or substituted or unsubstituted C₁-C₆ alkyl, or R⁷ and R⁸ taken together with the nitrogen to which they are attached form a substituted or unsubstituted C₂-C₆ heterocyclyl; and
[0406] p is an integer selected from 1 to 10.

[0407] In some embodiments of Formula (Ia), if the structure carries more than one asymmetric Catom, each asymmetric C-atom independently represents racemic, chirally pure R and/or chirally pure S isomer, or a combination thereof.

[0408] In some embodiments, R¹ and R² in Formula (I) and Formula (Ia) is independently C₇-C₂₂ alkyl, C₇-C₂₂ alkenyl, —C₂-C₁₀ alkylene-L-R⁶, or

[chemical structure]

wherein each of the alkyl, alkylene, alkenyl, and cycloalkyl is independently substituted or unsubstituted. In some embodiments, R¹ and R² in Formula (I) and Formula (Ia) is independently C₁₀-C₂₀ alkyl, C₁₀-C₂₀ alkenyl, —C₈-C₇ alkylene-L-R⁶, or

[chemical structure]

wherein each of the alkyl, alkylene, alkenyl, and cycloalkyl is independently substituted or unsubstituted. In some embodiments, R¹ in Formula (I) and Formula (Ia) is

[chemical structure]

[0409] In some embodiments, each of L in Formula (I) and Formula (Ia) is independently O, S, —C₁-C₁₀ alkylene-O—, —C₁-C₁₀ alkylene-C(═O)O—, —C₁-C₁₀ alkylene-OC(═O)—, or a bond, wherein the alkylene is substituted or unsubstituted. In some embodiments, each of L in Formula (I) and Formula (Ia) is independently O, S, —C₁-C₃ alkylene-O—, —C₁-C₃ alkylene-C(═O)O—, —C₁-C₃ alkylene-OC(═O)—, or a bond, wherein the alkylene is substituted or unsubstituted. In some embodiments, each of L in Formula (I) and Formula (Ia) is independently O, S, —C₁-C₃ alkylene-O—, —C₁-C₃ alkylene-C(═O)O—, —C₁-C₃ alkylene-OC(═O)—, or a bond, wherein the alkylene is linear or branched unsubstituted alkylene.

[0410] In some embodiments, each of R⁶ in Formula (I) and Formula (Ia) is independently substituted or unsubstituted linear C₃-C₂₂ alkyl or substituted or unsubstituted linear C₃-C₂₂ alkenyl. In some embodiments, each of R⁶ in Formula (I) and Formula (Ia) is independently substituted or unsubstituted C₃-C₂₀ alkyl or substituted or unsubstituted C₃-C₂₀ alkenyl. In some embodiments, each of R⁶ in Formula (I) and Formula (Ia) is independently substituted or unsubstituted C₃-C₁₀ alkyl or substituted or unsubstituted C₃-C₁₀ alkenyl. In some embodiments, each of R⁶ in Formula (I) and Formula (Ia) is independently substituted or unsubstituted C₃-C₁₀ alkyl. In some embodiments, each of R⁶ in Formula (I) and Formula (Ia) is independently substituted or unsubstituted linear C₃-C₁₀ alkyl. In some embodiments, each of R⁶ in Formula (I) and Formula (Ia) is independently substituted or unsubstituted n-pentyl, n-hexyl, n-heptyl, n-octyl, n-nonyl, n-decyl, n-undecyl, or n-dodecyl. In some embodiments, each of R⁶ in Formula (I) and Formula (Ia) is independently substituted or unsubstituted n-octyl. In some embodiments, each of R⁶ in Formula (I) and Formula (Ia) is n-octyl.

[0411] In some embodiments, each of L in Formula (I) and Formula (Ia) is independently —C(═O)O—, —OC(═O)—, —C₁-C₁₀ alkylene-O—, or O. In some embodiments, each of L in Formula (I) and Formula (Ia) is O. In some embodiments, each of L in Formula (I) and Formula (Ia) is —C₁-C₃ alkylene-O—. In some embodiments, p in Formula (I) and Formula (Ia) is 1, 2, 3, 4, or 5. In some embodiments, p in Formula (I) and Formula (Ia) is 2.

[0412] In some embodiments, R¹ in Formula (I) and Formula (Ia) is

[chemical structure]

[chemical structure]

[0413] In some embodiments each of R⁴ in Formula (I) and Formula (Ia) is independently H or substituted or unsubstituted C₁-C₄ alkyl. In some embodiments, each of R⁴ in Formula (I) and Formula (Ia) is independently substituted or unsubstituted linear C₁-C₄ alkyl. In some embodiments, each of R⁴ in Formula (1) and Formula (Ia) is H. In some embodiments, each of R⁴ in Formula (I) and Formula (Ia) is independently H, —CH₃, —CH₂CH₃, —CH₂CH₂CH₃, or —CH(CH₃)₂. In some embodiments, each of R⁴ in Formula (I) and Formula (Ia) is independently H or —CH₃. In some embodiments, each of R⁴ in Formula (1) and Formula (Ia) is —CH₃.

[0414] In some embodiments, X in Formula (I) and Formula (Ia) is —C(═O)O— or —OC(═O))—. In some embodiments, X in Formula (I) and Formula (Ia) is —C(═O)NR⁴— or —NR⁴C(═O)—. In some embodiments, X in Formula (I) and Formula (Ia) is —C(═O)N(CH₃)—, —N(CH₃)C(═O)—, —C(═O)NH—, or —NHC(═O)—. In some embodiments, X in Formula (I) and Formula (Ia) is —C(═O))NH—, —C(═O)N(CH₃)—, —OC(═O))—, —NHC(═O)—, —N(CH₃)C(═O))—, —C(═O)O—, —OC(═O)O—, —NHC(═O)O—, —N(CH₃)C(═O)O—, —OC(═O))NH—, —OC(═O)N(CH₃)—, —NHC(═O)NH—, —N(CH₃)C(═O))NH—, —NHC(═O)N(CH₃)—, —N(CH₃)C(═O)N(CH₃)—, NHC(═NH)NH—, —N(CH₃)C(═NH)NH—, —NHC(═NH)N(CH₃)—, —N(CH₃)C(═NH)N(CH₃)—, NHC(═NMe)NH—, —N(CH₃)C(═NMe)NH—, —NHC(═NMe)N(CH₃)—, or —N(CH₃)C(═NMe)N(CH₃)—.

[0415] In some embodiments. R² in Formula (I) and Formula (Ia) is C₇-C₂₂ alkyl, C₇-C₂₂ alkenyl, —C₂-C₁₀ alkylene-L-R⁶,

[chemical structure]

wherein each of the alkyl, alkylene, alkenyl, and cycloalkyl is independently substituted or unsubstituted. In some embodiments, R² in Formula (I) and Formula (Ia) is substituted or unsubstituted C₇-C₂₂ alkyl or substituted or unsubstituted C₇-C₂₂ alkenyl. In some embodiments, R² in Formula (I) and Formula (Ia) is substituted or unsubstituted linear C₇-C₂₂ alkyl or substituted or unsubstituted linear C₇-C₂₂ alkenyl. In some embodiments, R² in Formula (I) and Formula (Ia) is substituted or unsubstituted C₁₀-C₂₀ alkyl or substituted or unsubstituted C₁₀-C₂₀ alkenyl. In some embodiments, R² in Formula (I) and Formula (Ia) is unsubstituted C₁₀-C₂₀ alkyl. In some embodiments, R² in Formula (I) and Formula (Ia) is unsubstituted C₁₀-C₂₀ alkenyl. In some embodiments, R² in Formula (I) and Formula (Ia) is —C₂-C₁₀ alkylene-L-R⁶. In some embodiments, R² in Formula (I) and Formula (Ia) is —C₂-C₁₀ alkylene-C(═O)O— R⁶ or —C₂-C₁₀ alkylene-OC(═O)—R⁶.

[0416] In some embodiments, R² in Formula (I) and Formula (Ia) is

[chemical structure]

[0417] In some embodiments, Y in Formula (I) and Formula (Ia) is —C(═O)O— or —OC(O)—. In some embodiments, Y in Formula (I) and Formula (Ia) is —C(═O)NR⁴— or —NR⁴C(═O)—. In some embodiments, Y in Formula (I) and Formula (Ia) is —C(═O)N(CH₃)—, —N(CH₃)C(═O)—, —C(═O)NH—, or —NHC(═O)—. In some embodiments, Y in Formula (I) and Formula (Ia) is —OC(═O)O—, —NR⁴C(═O)O—, —OC(═O)NR⁴—, or —NR⁴C(═O)NR⁴—. In some embodiments. Y in Formula (I) and Formula (Ia) is —OC(═O)O—, —NHC(═O)O—, —OC(═O)NH—, —NHC(═O)NH—, —N(CH₃)C(═O)O—, —OC(═O)N(CH₃)—, —N(CH₃)C(═O)N(CH₃)— or —N(CH₃)C(═O)NH—. In some embodiments, Y in Formula (I) and Formula (Ia) is —OC(═O)O—, —NHC(═O)O—, —OC(═O)NH—, or —NHC(═O)NH—.

[0418] In some embodiments, R³ in Formula (I) and Formula (Ia) is —C₀-C₁₀ alkylene-NR⁷R⁸ or —C₀-C₁₀ alkylene-heterocycloalkyl, wherein the alkylene and heterocycloalkyl is independently substituted or unsubstituted. In some embodiments, R³ in Formula (I) and Formula (Ta) is —C₀-C₁₀ alkylene-NR⁷R⁸. In some embodiments, R³ in Formula (I) and Formula (Ia) is —C₁-C₆ alkylene-NR⁷R⁸. In some embodiments, R³ in Formula (I) and Formula (Ia) is —C₁-C₄ alkylene-NR⁷R⁸. In some embodiments, R³ in Formula (I) and Formula (Ia) is —C₁— alkylene-NR⁷R⁸. In some embodiments, R³ in Formula (I) and Formula (Ia) is —C₂-alkylene-NR⁷R⁸. In some embodiments, R³ in Formula (I) and Formula (Ia) is —C₃— alkylene-NR⁷R⁸. In some embodiments, R³ in Formula (I) and Formula (Ia) is —C₄— alkylene-NR⁷R⁸. In some embodiments, R³ in Formula (I) and Formula (Ia) is —C₅— alkylene-NR⁷R⁸. In some embodiments, R³ in Formula (I) and Formula (Ia) is —C₀-C₁₀ alkylene-heterocycloalkyl. In some embodiments, R³ in Formula (I) and Formula (Ia) is —C₁-C₆ alkylene-heterocycloalkyl, wherein the heterocycloalkyl comprises 1 to 3 nitrogen and 0-2 oxygen. In some embodiments, R³ in Formula (I) and Formula (Ia) is —C₁-C₆ alkylene-heterocycloaryl.

[0419] In some embodiments, each of R⁷ and R⁸ in Formula (I) and Formula (Ia) is independently hydrogen or substituted or unsubstituted C₁-C₆ alkyl. In some embodiments, each of R⁷ and R⁸ is independently hydrogen or substituted or unsubstituted C₁-C₃ alkyl. In some embodiments, each of R⁷ and R⁸ is independently substituted or unsubstituted C₁-C₃ alkyl. In some embodiments, each of R⁷ and R⁸ is independently —CH₃, —CH₂CH₃, —CH₂CH₂CH₃, or —CH(CH₃)₂. In some embodiments, each of R and R⁸ is CH₃. In some embodiments, each of R⁷ and R⁸ is —CH₂CH₃.

[0420] In some embodiments, R⁷ and R⁸ in Formula (I) and Formula (Ia) taken together with the nitrogen to which they are attached form a substituted or unsubstituted C₂-C₆ heterocyclyl. In some embodiments, R⁷ and R⁸ taken together with the nitrogen to which they are attached form a substituted or unsubstituted C₂-C₆ heterocycloalkyl. In some embodiments, R⁷ and R⁸ taken together with the nitrogen to which they are attached form a substituted or unsubstituted 3-7 membered heterocycloalkyl.

[0421] In some embodiments, R³ in Formula (I) and Formula (Ia) is

[chemical structure]

[0422] In some embodiments. R³ in Formula (I) and Formula (Ia) is

[chemical structure]

[0423] In some embodiments. R³ in Formula (I) and Formula (Ia) is

[chemical structure]

[0424] In some embodiments, Z in Formula (I) and Formula (Ia) is —C(═O)O— or —OC(═O)—. In some embodiments, Z in Formula (I) and Formula (Ia) is —C(═O)NR₄— or —NR₄C(═O)—. In some embodiments, Z in Formula (I) and Formula (Ia) is —C(═O)N(CH₃)—, —N(CH₃)C(═O)—, —C(═O)NH—, or —NHC(═O)—. In some embodiments, Z in Formula (I) and Formula (Ia) is —OC(═O)O—, —NR⁴C(═O)O—, —OC(O)NR⁴—, or —NR⁴C(═O)NR⁴—. In some embodiments. Z in Formula (I) and Formula (Ia) is —OC(═O)O—, —NHC(═O)O—, —OC(═O)NH—, —NHC(═O)NH—, —N(CH₃)C(═O)O—, —OC(═O)N(CH₃)—, —N(CH₃)C(═O)N(CH₃)—, —NHC(═O)N(CH₃)— or —N(CH₃)C(═O)NH—. In some embodiments, Y in Formula (I) and Formula (Ia) is —OC(═O)O—, —NHC(═O)O—, —OC(═O)NH—, or —NHC(═O)NH—.

[0425] In some embodiments, R⁵ in Formula (I) and Formula (Ia) is hydrogen or substituted or unsubstituted C₁-C₃ alkyl. In some embodiments, R⁵ in Formula (I) and Formula (Ia) is H, —CH₃, —CH—)CH₃, —CH₂CH₂CH₃, or —CH(CH₃)₂. In some embodiments, R⁵ in Formula (I) and Formula (Ia) is H.

[0426] In some embodiments, the LNP comprises a plurality of amino lipids. For example, the LNP composition can comprise 2, 3, 4, 5, 6.7, 8, 9. 10, or more amino lipids. For another example, the LNP composition can comprise at least 2, at least 3, at least 4, at least 5, at least 6, at least 7, at least 9, at least 10, or at least 20 amino lipids. For yet another example, the LNP composition can comprise at most 2, at most 3, at most 4, at most 5, at most 6, at most 7, at most 9, at most 10, at most 20, or at most 30 amino lipids.

[0427] In some embodiments, the LNP composition comprises a first amino lipid. In some embodiments, the LNP composition comprises a first amino lipid and a second amino lipid. In some embodiments, the LNP composition comprises a first amino lipid, a second amino lipid, and a third amino lipid. In some embodiments, the LNP composition comprises a first amino lipid, a second amino lipid, a third amino lipid, and a fourth amino lipid. In some embodiments, the LNP composition does not comprise a fourth amino lipid. In some embodiments, the LNP composition does not comprise a third amino lipid. In some embodiments, a molar ratio of the first amino lipid to the second amino lipid is from about 0.1 to about 10. In some embodiments, a molar ratio of the first amino lipid to the second amino lipid is from about 0.20 to about 5. In some embodiments, a molar ratio of the first amino lipid to the second amino lipid is from about 0.25 to about 4. In some embodiments, a molar ratio of the first amino lipid to the second amino lipid is about 0.25, about 0.33, about 0.5, about 1, about 2, about 3, or about 4.

[0428] In some embodiments, a molar ratio of the first amino lipid: the second amino lipid: the third amino lipid is about 4:1:1. In some embodiments, a molar ratio of the first amino lipid: the second amino lipid: the third amino lipid is about 1:1:1. In some embodiments, a molar ratio of the first amino lipid: the second amino lipid: the third amino lipid is about 2:1:1. In some embodiments, a molar ratio of the first amino lipid: the second amino lipid: the third amino lipid is about 2:2:1. In some embodiments, a molar ratio of the first amino lipid: the second amino lipid: the third amino lipid is about 3:2:1. In some embodiments, a molar ratio of the first amino lipid: the second amino lipid: the third amino lipid is about 3:1:1. In some embodiments, a molar ratio of the first amino lipid: the second amino lipid: the third amino lipid is about 5:1:1. In some embodiments, a molar ratio of the first amino lipid: the second amino lipid: the third amino lipid is about 3:3:1. In some embodiments, a molar ratio of the first amino lipid: the second amino lipid: the third amino lipid is about 4:4:1.

[0429] In some embodiments, the LNP composition comprises one or more amino lipids. In some embodiments, the one or more amino lipids comprise from about 40 mol % to about 65 mol % of the total lipid present in the particle. In some embodiments, the one or more amino lipids comprise about 40 mol %, about 41 mol %, about 42 mol %, about 43 mol %, about 44 mol %, about 45 mol %, about 46 mol %, about 47 mol %, about 48 mol %, about 49 mol %, about 50 mol %, about 51 mol %, about 52 mol %, about 53 mol %, about 54 mol %, about 55 mol %, about 56 mol %, about 57 mol %, about 58 mol %, about 59 mol %, about 60 mol %, about 61 mol %, about 62 mol %, about 63 mol %, about 64 mol %, or about 65 mol % of the total lipid present in the particle. In some embodiments, the first amino lipid comprises from about 1 mol % to about 99 mol % of the total amino lipids present in the particle. In some embodiments, the first amino lipid comprises from about 16.7 mol % to about 66.7 mol % of the total amino lipids present in the particle. In some embodiments, the first amino lipid comprises from about 20 mol % to about 60 mol % of the total amino lipids present in the particle.

[0430] In some embodiments, the amino lipid is an ionizable lipid. An ionizable lipid can comprise one or more ionizable nitrogen atoms. In some embodiments, at least one of the one or more ionizable nitrogen atoms is positively charged. In some embodiments, at least 10 mol %, 20 mol %, 30 mol %, 40 mol %, 50 mol %, 60 mol %, 70 mol %, 80 mol %. 90 mol %, 95 mol %, or 99 mol % of the ionizable nitrogen atoms in the LNP composition are positively charged. In some embodiments, the amino lipid comprises a primary amine, a secondary amine, a tertiary amine, an imine, an amide, a guanidine moiety, a histidine residue, a lysine residue, an arginine residue, or any combination thereof. In some embodiments, the amino lipid comprises a primary amine, a secondary amine, a tertiary amine, a guanidine moiety, or any combination thereof. In some embodiments, the amino lipid comprises a tertiary amine.

[0431] In some embodiments, the amino lipid is a cationic lipid. In some embodiments, the amino lipid is an ionizable lipid. In some embodiments, the amino lipid comprises one or more nitrogen atoms. In some embodiments, the amino lipid comprises one or more ionizable nitrogen atoms. Exemplary cationic and/or ionizable lipids include, but are not limited to, 3-(didodecylamino)-N1,N1,4-tri dodecyl-1-piperazineethan amine (KL10), N142-(didodecylamino)ethyl]-N1,N4,N4-tridodecyl-1,4-piperazinediethanamine (KL22), 14,25-ditridecyl-15,18,21,24-tetraaza-octatriacontane (KL25), 1,2-dilinoleyloxy-N,N-dimethylaminopropane (DLin-DMA), 2,2-dilinoleyl-4-dimethylaminomethyl-[1,3]-dioxolane (DLin-K-DMA), heptatriaconta-6,9,28,31-tetraen-19-yl 4-(dimethylamino)butanoate (DLin-MC 3-DMA), 2,2-dilinoleyl-4-(2-dimethylaminoethyl)-[1,3]-dioxolane (DLin-KC2-DMA), 1,2-dioleyloxy-N,N-dimethylaminopropane (DODMA), 2-({8-[(30)-cholest-5-en-3-yloxy]octyl}oxy)-N,N-dimethyl-3-[(9Z,12Z)-octadeca-9,12-dien-1-yloxy]propan-1-amine (Octyl-CLinDMA), (2R)-2-({8-[(3β)-cholest-5-en-3-yloxy]octyl}oxy)-N,N-dimethyl-3-[(9Z,12Z)-octadeca-9,12-dien-1-yloxy]propan-1-amine (Octyl-CLinDMA (2R)), and (2S)-2-({8-[(3β)-cholest-5-en-3-yloxy]octyl}oxy)-N,N-dimethy 1-3-[(9Z,12Z)-octadeca-9,12-dien-1-yloxy]propan-1-amine (Octyl-CLinDMA (2S)).

[0432] In some embodiments, an amino lipid described herein can take the form of a salt, such as a pharmaceutically acceptable salt. All pharmaceutically acceptable salts of the amino lipid are encompassed by this disclosure. As used herein, amino lipid also includes its pharmaceutically acceptable salts, and its diastereomeric, enantiomeric, and epimeric forms.

[0433] In some embodiments, an amino lipid described herein, possesses one or more stereocenters and each stereocenter exists independently in either the R or S configuration. The lipids presented herein include all diastereomeric, enantiomeric, and epimeric forms as well as the appropriate mixtures thereof. The lipids provided herein include all cis. trans, syn, anti, entgegen (E), and zusammen (Z) isomers as well as the appropriate mixtures thereof. In certain embodiments, lipids described herein are prepared as their individual stereoisomers by reacting a racemic mixture of the compound with an optically active resolving agent to form a pair of diastereoisomeric compounds/salts, separating the diastereomers and recovering the optically pure enantiomers. In some embodiments, resolution of enantiomers is carried out using covalent diastereomeric derivatives of the compounds described herein. In another embodiment, diastereomers are separated by separation/resolution techniques based upon differences in solubility. In other embodiments, separation of stereoisomers is performed by chromatography or by the forming diastereomeric salts and separation by recrystallization, or chromatography, or any combination thereof. Jean Jacques, Andre Collet, Samuel H. Wilen, “Enantiomers, Racemates and Resolutions”, John Wiley and Sons, Inc., 1981. In one aspect, stereoisomers are obtained by stereoselective synthesis.

[0434] In some embodiments, the lipids such as the amino lipids are substituted based on the structures disclosed herein. In some embodiments, the lipids such as the amino lipids are unsubstituted. In another embodiment, the lipids described herein are labeled isotopically (e.g. with a radioisotope) or by another other means, including, but not limited to, the use of chromophores or fluorescent moieties, bioluminescent labels, or chemiluminescent labels.

[0435] Lipids described herein include isotopically-labeled compounds, which are identical to those recited in the various formulae and structures presented herein, but for the fact that one or more atoms are replaced by an atom having an atomic mass or mass number different from the atomic mass or mass number usually found in nature. Examples of isotopes that can be incorporated into the present lipids include isotopes of hydrogen, carbon, nitrogen, oxygen, sulfur, fluorine and chlorine, such as, for example, ²H, ³H, ¹³C, ¹⁴C, ¹⁵N, ¹⁸O, ¹⁷O, ³⁵S ¹⁸F, ³⁶Cl. In one aspect, isotopically-labeled lipids described herein, for example those into which radioactive isotopes such as ³H and ¹⁴C are incorporated, are useful in drug and/or substrate tissue distribution assays. In one aspect, substitution with isotopes such as deuterium affords certain therapeutic advantages resulting from greater metabolic stability, such as, for example, increased in vivo half-life or reduced dosage requirements.

[0436] In some embodiments, the asymmetric carbon atom of the amino lipid is present in enantiomerically enriched form. In certain embodiments, the asymmetric carbon atom of the amino lipid has at least 50% enantiomeric excess, at least 60% enantiomeric excess, at least 70% enantiomeric excess, at least 80% enantiomeric excess, at least 90% enantiomeric excess, at least 95% enantiomeric excess, or at least 99% enantiomeric excess in the (S)- or (R)-configuration.

[0437] In some embodiments, the disclosed amino lipids can be converted to N-oxides. In some embodiments, N-oxides are formed by a treatment with an oxidizing agent (e.g., 3-chloroperoxybenzoic acid and/or hydrogen peroxides). Accordingly, disclosed herein are N-oxide compounds of the described amino lipids, when allowed by valency and structure, which can be designated as N O or N*—O—. In some embodiments, the nitrogen in the compounds of the disclosure can be converted to N-hydroxy or N-alkoxy. For example, N-hydroxy compounds can be prepared by oxidation of the parent amine by an oxidizing agent such as ra-CPBA. All shown and claimed nitrogen containing compounds are also considered. Accordingly, also disclosed herein are N-hydroxy and Nal koxy (e.g., N—OR, wherein R is substituted or unsubstituted C₁-C₆ alkyl, C₁-C₆ alkenyl, C₁-C₆ alkynyl, 3-14-membered carbocycle or 3-14-membered heterocycle) derivatives of the described amino lipids.

### PEG-Lipid

[0438] As used herein, a “PEG lipid” or “PEG-lipid” refers to a lipid comprising a polyethylene glycol component.

[0439] In some embodiments, the described LNP composition comprises a PEG-lipid. In some embodiments, the described LNP composition comprises two or more PEG-lipids. Exemplary PEG-lipids include, but are not limited to, the lipids. Exemplary PEG-lipids also include, but are not limited to, PEG-modified phosphatidylethanolamines, PEG-modified phosphatidic acids, PEG-modified ceramides, PEG-modified dialkylamines, PEG-modified diacylglycerols, PEG-modified dialkylglycerols, and mixtures thereof. For example, the one or more PEG-lipids can comprise PEG-c-DOMG, PEG-DMG, PEG-DLPE, PEG-DMPE, PEG-DPPC, a PEG-DSPE lipid, or a combination thereof. In some embodiments, PEG moiety is an optionally substituted linear or branched polymer of ethylene glycol or ethylene oxide. In some embodiments, the PEG moiety is substituted, e.g., by one or more alkyl, alkoxy, acyl, hydroxy, or aryl groups. In some embodiments, the PEG moiety includes PEG copolymer such as PEG-polyurethane or PEG-polypropylene (see, e.g., j. Milton Harris, Poly(ethylene glycol) chemistry: biotechnical and biomedical applications (1992)). In some embodiments, the PEG moiety does not include PEG copolymers, e.g., it may be a PEG monopolymer. Exemplary PEG-lipids include, but are not limited to, PEG-dilauroylglycerol, PEG-dimyristoylglycerol (PEG-DMG), PEG-dipalmitoylglycerol, PEG-distearoylgiycerol (PEG-DSPE), PEG-dipalmitoylglycerol, PEG-disteiylglycerol, PEG-dilawylglycamide, PEG-dimyristylglycamide, PEG-dipalmitoylglycamide, PEG-disterylglycamide, PEG-cholesterol, and PEG-DMB (3,4-Ditetradecoxylbenzyl-[omega]-methyl-poly(ethylene glycol) ether), 1,2-dimyristoyl-sn-glycero-3-phosphoethanolamine-N-[methoxy(polyethylene glycol)−2000]).

[0440] In some embodiments, a PEG-lipid is a PEG-lipid conjugate, for example, PEG coupled to dialkyloxypropyls (e.g., PEG-DAA conjugates), PEG coupled to diacylglycerols (e.g., PEG-DAG conjugates), PEG coupled to cholesterol, PEG coupled to phosphatidylethanolamines, and PEG conjugated to ceramides (see, e.g., U.S. Pat. No. 5,885,613), cationic PEG lipids, polyoxazoline (POZ)-lipid conjugates (e.g. POZ-DAA conjugates; see, e.g., WO 2010/006282), polyamide oligomers (e.g., ATTA-lipid conjugates), and mixtures thereof.

[0441] A PEG-lipid can comprise one or more ethylene glycol units, for example, at least 1, at least 2, at least 5, at least 10, at least 20, at least 30, at least 40, at least 50, at least 60, at least 70, at least 80, at least 90, at least 100, at least 120, or at least 150 ethylene glycol units. In some embodiments, a number average molecular weight of the PEG-lipids is from about 200 Da to about 5000 Da. In some embodiments, a number average molecular weight of the PEG-lipids is from about 500 Da to about 3000 Da. In some embodiments, a number average molecular weight of the PEG-lipids is from about 750 Da to about 2500 Da. In some embodiments, a number average molecular weight of the PEG-lipids is from about 750 Da to about 2500 Da. In some embodiments, a number average molecular weight of the PEG-lipids is about 500 Da, about 750 Da, about 1000 Da, about 1250 Da, about 1500 Da, about 1750 Da, or about 2000 Da. In some embodiments, a polydispersity index (PD1) of the one or more PEG-lipids is smaller than 2. In some embodiments, a PDI of the one or more PEG-lipids is at most 1.1, 1.2, 1.3, 1.4, 1.5, 1.6, 1.7, 1.8, 1.9, 2.0, 2.1, 2.2, 2.3. 2.4, 2.5, 2.6, 2.7, 2.8, 2.9, or 3.0. In some embodiments, a PDI of the one or more PEG-lipids is at least 1.1, 1.2, 1.3, 1.4, 1.5, 1.6, 1.7, 1.8, 1.9, 2.0, 2.1, 2.2, 2.3, 2.4, 2.5, 2.6, 2.7, 2.8, 2.9, or 3.0.

[0442] In some embodiments, the PEG-lipid comprises from about 0.1 mol % to about 10 mol % of the total lipid present in the particle. In some embodiments, the PEG-lipid comprises from about 0.1 mol % to about 6 mol % of the total lipid present in the particle. In some embodiments, the PEG-lipid comprises from about 0.5 mol % to about 5 mol % of the total lipid present in the particle. In some embodiments, the PEG-lipid comprises from about 1 mol % to about 3 mol % of the total lipid present in the particle. In some embodiments, the PEG-lipid comprises about 2.0 mol % to about 2.5 mol % of the total lipid present in the particle. In some embodiments, the PEG-lipid comprises about 1 mol %, about 1.1 mol %, about 1.2 mol %, about 1.3 mol %, about 1.4 mol %, about 1.5 mol %, about 1.6 mol %, about 1.7 mol %, about 1.8 mol %, about 1.9 mol %, about 2.0 mol %, about 2.1 mol %, about 2.2 mol %, about 2.3 mol %, about 2.4 mol %, about 2.5 mol %, about 2.6 mol %, about 2.7 mol %, about 2.8 mol %, about 2.9 mol %, or about 3.0 mol % of the total lipid present in the particle.

### Phospholipid

[0443] As used herein, a “phospholipid” refers to a lipid that includes a phosphate moiety and one or more carbon chains, such as unsaturated fatty acid chains. A phospholipid may include one or more multiple (e.g., double or triple) bonds. In some embodiments, a phospholipid may facilitate fusion to a membrane. For example, a cationic phospholipid may interact with one or more negatively charged phospholipids of a membrane (e.g., a cellular or intracellular membrane). Fusion of a phospholipid to a membrane may allow one or more elements of an LNP to pass through the membrane, i.e., delivery of the one or more elements to a cell.

[0444] In some embodiments, the described LNP composition comprises a phospholipid. In some embodiments, the phospholipid comprises a lipid selected from the group consisting of: phosphatidylcholine (PC), phosphatidylethanolamine amine, glycerophospholipid, sphingophospholipids, Guriserohosuhono, sphingolipids phosphono lipids, natural lecithins, and hydrogenated phospholipid. In some embodiments, the phospholipid comprises a phosphatidylcholine. Exemplary phosphatidylcholines include, but are not limited to, soybean phosphatidylcholine, egg yolk phosphatidylcholine (EPC), distearoylphosphatidylcholine, 1,2-distearoyl-sn-glycero-3-phosphocholine (DSPC), dipalmitoyl phosphatidylcholine, dipalmitoyl-sn-glycero-3-phosphocholine (DPPC), 2-Oleoyl-1-palmitoyl-sn-glycero-3-phosphocholine (POPC), dimyristoyl phosphatidylcholine (DMPC), and dioleoyl phosphatidylcholine (DOPC). In certain specific embodiments, the phospholipid is DSPC.

[0445] In some embodiments, the phospholipid comprises a phosphatidylethanolamine amine. In some embodiments, the phosphatidylethanolamine amine is distearoyl phosphatidylethanolamine (DSPE), dipalmitoyl phosphatidyl ethanolamine (DPPE), 1,2-dioleoyl-sn-glycero-3-phosphoethanolamine (DOPE), dimyristoyl phosphoethanolamine (DMPE), 16-O-Monome Le PE, 16-O-dimethyl PE, 18-1-trans PE, palmitoyl oleoyl-phosphatidylethanolamine (POPE), or 1-stearoyl-2-oleoyl-phosphatidyl ethanolamine (SOPE). In some embodiments, the phospholipid comprises a glycerophospholipid. In some embodiments, the glycerophospholipid is plasmalogen, phosphatidate, or phosphatidylcholine. In some embodiments, the glycerophospholipid is phosphatidylserine, phosphatidic acid, phosphatidylglycerol, phosphatidylinositol, palmitoyl oleoyl phosphatidylglycerol (POPG), or lysophosphatidylcholine. In some embodiments, the phospholipid comprises a sphingophospholipid. In some embodiments, the sphingophospholipid is sphingomyelin, ceramide phosphoethanolamine, ceramide phosphoglycerol, or ceramide phosphoglycerophosphoric acid. In some embodiments, the phospholipid comprises a natural lecithin. In some embodiments, the natural lecithin is egg yolk lecithin or soybean lecithin. In some embodiments, the phospholipid comprises a hydrogenated phospholipid. In some embodiments, the hydrogenated phospholipid is hydrogenated soybean phosphatidylcholine. In some embodiments, the phospholipid is selected from the group consisting of: phosphatidylcholine, phosphatidylethanolamine, phosphatidylserine, phosphatidylinositol, phosphatidic acid, palmitoyloleoyl phosphatidylcholine, lysophosphatidylcholine, lysophosphatidylethanolamine, dipalmitoylphosphatidylcholine, dioleoylphosphatidylcholine, distearoylphosphatidylcholine, and dilinoleoylphosphatidylcholine.

[0446] In some embodiments, the phospholipid comprises a lipid selected from: 1,2-distearoyl-sn-glycero-3-phosphocholine (DSPC). 1,2-dioleoyl-sn-glycero-3-phosphoethanolamine (DOPE), 1,2-dilinoleoyl-sn-glycero-3-phosphocholine (DLPC), 1,2-dimyristoyl-sn-glycero-phosphocholine (DMPC), 1,2-dioleoyl-sn-glycero-3-phosphocholine (DOPC), 1,2-dipalmitoyl-sn-glycero-3-phosphocholine (DPPC), 1,2-diundecanoyl-sn-glycero-phosphocholine (DUPC), 2-Oleoyl-1-pahnitoyl-sn-glycero-3-phosphocholine (POPC), 1,2-di-O-octadecenyl-sn-glycero-3-phosphocholine (18:0 Diether PC), 1-oleoyl-2-cholesterylhemisuccinoyl-sn-glycero-3-phosphocholine (OChemsPC), 1-hexadecyl-sn-glycero-3-phosphocholine (C16 Lyso PC), 1,2-dilinolenoyl-sn-glycero-3-phosphocholine, 1,2-di arachidonoyl-sn-glycero-3-phosphocholine, 1,2-di docosahexaenoyl-sn-glycero-3-phosphocholine, 1,2-diphytanoyl-sn-glycero-3-phosphoethanolamine (ME 16.0 PE), 1,2-distearoyl-sn-glycero-3-phosphoethanolamine, 1,2-dilinoleoyl-sn-glycero-3-phosphoethanolamine, 1,2-dilinolenoyl-sn-glycero-3-phosphoethanolamine, 1,2-diaracliidonoyl-sn-gly cero-3-phosphoethanol amine, 1,2-di docosahexaenoyl-sn-glycero-3-phosphoethanolamine, 1,2-diol eoy I-sn-glycero-3-phospho-rac-(1-glycerol) sodium salt (DOPG), and sphingomyelin.

[0447] A phospholipid can comprise a phospholipid moiety and one or more fatty acid moieties. A phospholipid moiety can comprise phosphatidyl choline, phosphatidyl ethanolamine, phosphatidyl glycerol, phosphatidyl serine, phosphatidic acid, 2-lysophosphatidyl choline, or a sphingomyelin. A fatty acid moiety can comprise lauric acid, myristic acid, myristoleic acid, palmitic acid, palmitoleic acid, stearic acid, oleic acid, linoleic acid, alpha-linolenic acid, erucic acid, phytanoic acid, arachidic acid, arachidonic acid, eicosapentaenoic acid, behenic acid, docosapentaenoic acid, or docosahexaenoic acid. In some specific embodiments, a phospholipid can be functionalized with or cross-linked to one or more alkynes, which may undergo a copper-catalyzed cycloaddition upon exposure to an azide.

[0448] In some embodiments, the LNP composition comprises a plurality of phospholipids, for example, at least 2, 3, 4, 5, or more distinct phospholipids. In some embodiments, the phospholipid comprises from 1 mol % to 20 mol % of the total lipid present in the particle. In some embodiments, the phospholipid comprises from about 5 mol % to about 15 mol % of the total lipid present in the particle. In some embodiments, the phospholipid comprises from about 8 mol % to about 12 mol % of the total lipid present in the particle. In some embodiments, the phospholipid comprises from about 9 mol %, 10 mol %, or 11 mol % of the total lipid present in the particle.

### Cholesterol

[0449] In some embodiments, the LNP composition comprises a cholesterol or a derivative thereof. In some embodiments, the LNP composition comprises a structural lipid. The structural lipid can be selected from steroid, sterol, alkyl resoreinol, cholesterol or derivative thereof, fecosterol, sitosterol, ergosterol, campesterol, stigmasterol, brassicasterol, tomatidine, tomatine, ursolic acid, alphatocopherol, and a combination thereof. In some embodiments, the structural lipid is a corticosteroid such as prednisolone, dexamethasone, prednisone, and hydrocortisone. In some embodiments, the cholesterol or derivative thereof is cholesterol, 5-heptadecylresorcinol, or cholesterol hemisuccinate. In some embodiments, the cholesterol or derivative thereof is cholesterol.

[0450] In some embodiments, the cholesterol or derivative thereof is a cholesterol derivative. In some embodiments, the cholesterol derivative is a polar cholesterol analogue. In some embodiments, the polar cholesterol analogue is 5a-cholestanol, 513-coprostanol, cholesteryl-(2′-hydroxy)-ethyl ether, cholestelyl-(4′-hydroxy)-butyl ether, or 6-ketocholestanol. In some embodiments, the polar cholesterol analogue is cholesteryl-(4′-hydroxy)-butyl ether. In some embodiments, the cholesterol derivative is a non-polar cholesterol analogue. In some embodiments, the non-polar cholesterol analogue is 5acholestane, cholestenone, 5α-cholestanone, 50-cholestanone, or cholestetyl decanoate.

[0451] In some embodiments, the cholesterol or the derivative thereof comprises from 20 mol % to 50 mol % of the total lipid present in the particle. In some embodiments, the cholesterol or the derivative thereof comprises about 20 mol %, about 21 mol %, about 22 mol %, about 23 mol %, about 24 mol %, about 25 mol %, about 26 mol %, about 27 mol %, about 28 mol %, about 29 mol %, about 30 mol %, about 31 mol %, about 32 mol %, about 33 mol %, about 34 mol %, about 35 mol %, about 36 mol %, about 37 mol %, about 38 mol %, about 39 mol %, about 40 mol %, about 41 mol %, about 42 mol %, about 43 mol %, about 44 mol %. about 45 mol %. about 46 mol %, about 47 mol %, about 48 mol %, or about 50 mol % of the total lipid present in the particle.

### Phosphate Charge Neutralizer

[0452] In some embodiments, the LNP described herein comprises a phosphate charge neutralizer. In some embodiments, the phosphate charge neutralizer comprises arginine, asparagine, glutamine, lysine, histidine, cationic dendrimers, polyamines, or a combination thereof. In some embodiments, the phosphate charge neutralizer comprises one or more nitrogen atoms. In some embodiments, the phosphate charge neutralizer comprises a polyamine. In some embodiments, the polyamine is 1,3-propanediamine, spermine, spermidine, Norspermidine, Tris(2-aminoethy)amine, Cyclen, 1,4,7-Triazacyclononane, 1,1,1-Tris(aminomethyl)ethane, Diethylenetriamine, Triethylenetetramine, or a combination thereof. In some embodiments, the polyamine is 1,3-propanediamine, 1,4-butanediamine, spermine, spermidine, or a combination thereof. In some embodiments, the N/P ratio for the phosphate charge neutralizer is from 0.01 to 10. In some embodiments, the N/P ratio for the phosphate charge neutralizer is from about 0.05 to about 2. In some embodiments, the N/P ratio for the phosphate charge neutralizer is from about 0.1 to about 1. In some embodiments, the N/P ratio for the phosphate charge neutralizer is about 0.1, about 0.2, about 0.3, about 0.4, about 0.5, about 0.6, about 0.7, about 0.8, about 0.9, or about 1. In some embodiments, the NIP ratio for the phosphate charge neutralizer is about 0.25, 0.5, or 0.75.

### Antioxidants

[0453] In some embodiments, the LNP described herein comprises one or more antioxidants. In some embodiments, the one or more antioxidants function to reduce a degradation of the cationic lipids, the payload, or both. In some embodiments, the one or more antioxidants comprise a hydrophilic antioxidant. In some embodiments, the one or more antioxidants is a chelating agent such as ethylenediaminetetraacefic acid (EDTA) and citrate. In some embodiments, the one or more antioxidants is EDTA. In some embodiments, the one or more antioxidants comprise a lipophilic antioxidant. In some embodiments, the lipophilic antioxidant comprises a vitamin E isomer or a polyphenol. In some embodiments, the one or more antioxidants are present in the LNP composition at a concentration of at least 1 mM, at least 10 mM, at least 20 mM, at least 50 mM, or at least 100 mM. In some embodiments, the one or more antioxidants are present in the particle at a concentration of about 20 mM.

### Payload

[0454] The LNPs described herein can be designed to deliver a payload, such as a therapeutic agent, or a target of interest. In some embodiments, an LNP described herein encloses one or more components of a base editor system as described herein. For example, a LNP may enclose one or more of a guide RNA, a nucleic acid encoding the guide RNA, a vector encoding the guide RNA, a base editor fusion protein, a nucleic acid encoding the base editor fusion protein, a programmable DNA binding domain, a nucleic acid encoding the programmable DNA binding domain, a deaminase, a nucleic acid encoding the deaminase, or all or any combination thereof. In some embodiments, the nucleic acid is a DNA. In some embodiments, the nucleic acid is a RNA, for example, a mRNA.

[0455] Additional exemplary therapeutic agents include, but are not limited to, antibodies (e.g., monoclonal, chimeric, humanized, nanobodies, and fragments thereof etc.), cholesterol, hormones, peptides, proteins, chemotherapeutics and other types of antineoplastic agents, low molecular weight drugs, vitamins, co-factors, nucleosides, nucleotides, oligonucleotides, enzymatic nucleic acids, antisense nucleic acids, triplex forming oligonucleotides, antisense DNA or RNA compositions, chimeric DNA:RNA compositions, allozymes, aptamers, ribozyme, decoys and analogs thereof, plasmids and other types of expression vectors, and small nucleic acid molecules, RNAi agents, short interfering nucleic acid (siNA), messenger ribonucleic acid (messenger RNA, mRNA), short interfering RNA (siRNA), double-stranded RNA (dsRNA), micro-RNA (miRNA), and short hairpin RNA (shRNA) molecules, peptide nucleic acid (PNA), a locked nucleic acid ribonucleotide (LNA), morpholino nucleotide, threose nucleic acid (TNA), glycol nucleic acid (GNA), sisiRNA (small internally segmented interfering RNA), aiRNA (asymetrical interfering RNA), and siRNA with 1, 2 or more mismatches between the sense and anti-sense strand to relevant cells and/or tissues, such as in a cell culture, subject or organism. Therapeutic agents can be purified or partially purified, and can be naturally occurring or synthetic, or chemically modified. In some embodiments, the therapeutic agent is an RNAi agent, short interfering nucleic acid (siNA), short interfering RNA (siRNA), double-stranded RNA (dsRNA), micro-RNA (miRNA), or a short hairpin RNA (shRNA) molecule. In some embodiments, the therapeutic agent is an mRNA.

[0456] In some embodiments, the payload comprises one or more nucleic acid(s) (i.e., one or more nucleic acid molecular entities). In some embodiments, the nucleic acid is a single-stranded nucleic acid. In some embodiments, single-stranded nucleic acid is a DNA. In some embodiments, single-stranded nucleic acid is an RNA. In some embodiments, the nucleic acid is a double-stranded nucleic acid. In some embodiments, the double-stranded nucleic acid is a DNA. In some embodiments, the double-stranded nucleic acid is an RNA. In some embodiments, the double-stranded nucleic acid is a DNA-RNA hybrid. In some embodiments, the nucleic acid is a messenger RNA (mRNA), a microRNA, an asymmetrical interfering RNA (aiRNA), a small hairpin RNA (shRNA), or a Dicer-Substrate dsRNA.

### Other Lipids

[0457] In some embodiments, the disclosed LNP compositions comprise a helper lipid. In some embodiments, the disclosed LNP compositions comprise a neutral lipid. In some embodiments, the disclosed LNP compositions comprise a stealth lipid. In some embodiments, the disclosed LNP compositions comprises additional lipids.

[0458] As used herein, neutral lipids suitable for use in a lipid composition of the disclosure include, for example, a variety of neutral, uncharged or zwitterionic lipids. Examples of neutral phospholipids suitable for use in the present disclosure include, but are not limited to, 5-heptadecylbenzene-1,3-diol (resorcinol), 1,2-dipalmitoyl-sn-glycero-3-phosphocholine (DPPC), 1,2-distearoyl-sn-glycero-3-phosphocholine (DSPC), phosphocholine (DOPC), 1,2-dimyristoyl-sn-glycero-phosphocholine (DMPC), phosphatidylcholine (PLPC), 1,2-distearoyl-sn-glycero-3-phosphocholine (DAPC), phosphatidylethanolamine (PE), egg phosphatidylcholine (EPC), dilauryloylphosphatidylcholine (DLPC), 1-myristoyl-2-palmitoyl phosphatidylcholine (MPPC), 1-palmitoyl-2-myristoyl phosphatidylcholine (PMPC), 1-palmitoyl-2-stearoyl phosphatidylcholine (PSPC), 1,2-diarachidoylsn-glycero-3-phosphocholine (DBPC), 1-stearoyl-2-palmitoyl phosphatidylcholine (SPPC), 1,2-dieicosenoyl-sn-glycero-3-phosphocholine (DEPC), 2-Oleoyl-1-palmitoyl-sn-glycero-3-phosphocholine (POPC), lysophosphatidyl choline, 1,2-dioleoyl-sn-glycero-3-phosphoethanolamine (DOPE), dilinoleoylphosphatidylcholine distearoylphosphatidylethanolamine (DSPE), dimyristoyl phosphatidylethanolamine (DMPE), dipalmitoyl phosphatidylethanolamine (DPPE), palmitoyloleoyl phosphatidylethanolamine (POPE), lysophosphatidylethanolamine and combinations thereof. In some embodiments, the neutral phospholipid is selected from the group consisting of DSPC and dimyristoyl phosphatidyl ethanolamine (DMPE). In some embodiments, the neutral phospholipid is DSPC. Neutral lipids can function to stabilize and improve processing of the LNPs.

[0459] Helper lipids can refer to lipids that enhance transfection (e.g. transfection of the nanoparticle (LNP) comprising the composition as provided herein, including the biologically active agent). The mechanism by which the helper lipid enhances transfection includes enhancing particle stability. In some embodiments, the helper lipid enhances membrane fusogenicity. Helper lipids can include steroids, sterols, and alkyl resorcinols. Helper lipids suitable for use in the present disclosure can include, but are not limited to, cholesterol, 5-heptadecylresorcinol, and cholesterol hemisuccinate. In some embodiments, the helper lipid is cholesterol. In some embodiments, the helper lipid is be cholesterol hemisuccinate.

[0460] Stealth lipids can refer to lipids that alter the length of time the nanoparticles can exist in vivo (e.g., in the blood). Stealth lipids can assist in the formulation process by, for example, reducing particle aggregation and controlling particle size. Stealth lipids used herein may modulate pharmacokinetic properties of the LNP. Stealth lipids suitable for use in a lipid composition of the disclosure can include, but are not limited to, stealth lipids having a hydrophilic head group linked to a lipid moiety. Stealth lipids suitable for use in a lipid composition of the present disclosure and information about the biochemistry of such lipids can be found in Romberg et al, Pharmaceutical Research, Vol. 25, No. 1, 2008, pg. 55-71 and I-Toekstra et al, Biochimica et Biophysica Acta 1660 (2004) 41-52. Additional suitable PEG lipids are disclosed, e.g., in WO 2006/007712.

[0461] In some embodiments, the stealth lipid is a PEG-lipid. In one embodiment, the hydrophilic head group of stealth lipid comprises a polymer moiety selected from polymers based on PEG (sometimes referred to as poly(ethylene oxide)), poly(oxazoline), poly(vinyl alcohol), poly(glycerol), poly(N-vinylpyrrolidone), polyaminoacids and poly N-(2-hydroxypropyl)methacrylamide]. Stealth lipids can comprise a lipid moiety. In some embodiments, the lipid moiety of the stealth lipid may be derived from diacylglycerol or diacylglycamide, including those comprising a dialkylglycerol or dialkylglycamide group having alkyl chain length independently comprising from about C4 to about C40 saturated or unsaturated carbon atoms, wherein the chain may comprise one or more functional groups such as, for example, an amide or ester. The dialkylglycerol or dialkylglycamide group can further comprise one or more substituted alkyl groups.

[0462] The structures and properties of helper lipids, neutral lipids, stealth lipids, and/or other lipids are further described in WO2017173054A1, WO2019067999A1, US20180290965A1, US20180147298A1, US20160375134A1, U.S. Pat. Nos. 8,236,770, 8,021,686, 8,236,770B2, U.S. Pat. No. 7,371,404B2, U.S. Pat. No. 7,780,983B2, U.S. Pat. No. 7,858,117B2, US20180200186A1, US20070087045A1, WO2018119514A1, and WO2019067992A1, all of which are hereby incorporated by reference in their entirety.

### LNP Formulations

[0463] The LNPs described herein can be designed for one or more specific applications or targets. The elements of a nanoparticle (LNP) composition or a composition can be selected based on a particular application or target, and/or based on the efficacy, toxicity, expense, ease of use, and availability. Similarly, the particular formulation of a nanoparticle composition is a composition comprising one or more described lipids. may be selected for the particular application or target. Suitable phosphate charge neutralizers to be used in formulations include, but are not limited to, Spermidine and 1,3-propanediamine.

[0464] The described LNP formulations can be designed for one or more specific applications or targets. For example, a nanoparticle composition may be designed to deliver a therapeutic agent such as an RNA to a particular cell, tissue, organ, or system or group thereof in a mammal's body. Physiochemical properties of nanoparticle compositions may be altered in order to increase selectivity for particular bodily targets. For instance, particle sizes may be adjusted based on the fenestration sizes of different organs. The therapeutic agent included in a nanoparticle composition may also be selected based on the desired delivery target or targets. For example, a therapeutic agent may be selected for a particular indication, condition, disease, or disorder and/or for delivery to a particular cell, tissue, organ, or system or group thereof (e.g., localized or specific delivery). In certain embodiments, a nanoparticle composition may include an mRNA encoding a polypeptide of interest capable of being translated within a cell to produce the polypeptide of interest. Such a composition may be designed to be specifically delivered to a particular organ.

[0465] The amount of a therapeutic agent in an LNP composition may depend on the size, composition, desired target and/or application, or other properties of the nanoparticle composition. For example, the amount of an RNA comprised in a nanoparticle composition may depend on the size, sequence, and other characteristics of the RNA. The relative amounts of a therapeutic agent and other elements (e.g., lipids) in a nanoparticle composition may also vary. In some embodiments, the wt/wt ratio of the lipid component to a therapeutic agent in a nanoparticle composition may be from about 5:1 to about 60:1, such as about 5:1. 6:1, 7:1, 8:1, 9:1, 10:1, 11:1, 12:1, 13:1, 14:1, 15:1, 16:1, 17:1, 18:1, 19:1, 20:1, 25:1, 30:1, 35:1, 40:1, 45:1, 50:1, and 60:1. For example, the wt/wt ratio of the lipid component to a therapeutic agent may be from about 10:1 to about 40:1. In certain embodiments, the wt/wt ratio is about 20:1. The amount of a therapeutic agent in a nanoparticle composition can be measured using absorption spectroscopy (e.g., ultraviolet-visible spectroscopy).

[0466] In some embodiments, an LNP composition comprises one or more nucleic acids such as RNAs. In some embodiments, the one or more RNAs, lipids, and amounts thereof may be selected to provide a specific NIP ratio. The NIP ratio can be selected from about 1 to about 30. The N/P ratio can be selected from about 2 to about 10. In some embodiments, the NIP ratio is from about 0.1 to about 50. In some embodiments, the N/P ratio is from about 2 to about 8. hi some embodiments, the NIP ratio is from about 2 to about 15, from about 2 to about 10, from about 2 to about 8, from about 2 to about 6, from about 3 to about 15, from about 3 to about 10, from about 3 to about 8, from about 3 to about 6, from about 4 to about 15, from about 4 to about 10, from about 4 to about 8, or from about 4 to about 6. hi some embodiments, the N/P ratio is about 2, about 2.5, about 3, about 3.5, about 4, about 4.5, about 5, about 5.5, about 6, or about 6.5. In some embodiments, the NIP ratio is from about 4 to about 6. In some embodiments, the NIP ratio is about 4, about 4.5, about 5, about 5.5, or about 6.

[0467] In some embodiments, the LNPs are formed with an average encapsulation efficiency ranging from about 50% to about 70%, from about 70% to about 90%, or from about 90% to about 100%. In some embodiments, the LNPs are formed with an average encapsulation efficiency ranging from about 75% to about 95%.

[0468] In another aspect, provided herein is a lipid nanoparticle (LNP) comprising the composition as provided herein. As used herein, a lipid nanoparticle (LNP) composition or a nanoparticle composition is a composition comprising one or more described lipids. LNP compositions are typically sized on the order of micrometers or smaller and may include a lipid bilayer. Nanoparticle compositions encompass lipid nanoparticles (LNPs), liposomes (e.g., lipid vesicles), and lipoplexes. In some embodiments, a LNP refers to any particle that has a diameter of less than 1000 nm, 500 nm, 250 nm, 200 nm, 150 nm, 100 nm, 75 nm, 50 nm, or 25 nm. In some embodiments, a nanoparticle may range in size from 1-1000 nm, 1-500 nm, 1-250 nm, 25-200 nm, 25-100 nm, 35-75 nm, or 25-60 nm. In some embodiments, a liposome having a lipid bilayer with a diameter of 500 rim or less. In some embodiments, the LNPs described herein can have a mean diameter of from about 1 nm to about 2500 nm, from about 10 nm to about 1500 nm, from about 20 nm to about 1000 nm, from about 30 nm to about 150 nm, from about 40 nm to about 150 nm, from about 50 rim to about 150 nm, from about 60 nm to about 130 nm, from about 70 nm to about 110 nm, from about 70 nm to about 100 nm, from about 80 nm to about 100 nm, from about 90 nm to about 100 nm, from about 70 to about 90 nm, from about 80 nm to about 90 nm- or from about 70 nm to about 80 nm. The LNPs described herein can have a mean diameter of about 30 nm, 35 nm, 40 nm, 45 nm, 50 nm, 55 nm, 60 nm, 65 nm, 70 nm, 75 nm, 80 nm, 85 nm, 90 nm, 95 nm, 100 nm, 105 nm, 110 nm, 115 nm, 120 nm, 125 nm, 130 nm, 135 nm, 140 nm, 145 nm, 150 nm, or greater. The LNPs described herein can be substantially non-toxic.

[0469] In some embodiments, an LNP may be made from cationic, anionic, or neutral lipids. In some embodiments, an LNP may comprise neutral lipids, such as the fusogenic phospholipid 1,2-Dioleoyl-sn-glycero-3-phosphoethanolamine (DOPE) or the membrane component cholesterol, as helper lipids to enhance transfection activity and nanoparticle stability. In some embodiments, an LNP may comprise hydrophobic lipids, hydrophilic lipids, or both hydrophobic and hydrophilic lipids. Any lipid or combination of lipids that are known in the art can be used to produce an LNP. Examples of lipids used to produce LNPs include, but are not limited to DOTMA (N[1-(2,3-dioleyloxy)propyl]-N,N,N-trimethylammonium chloride), DOSPA (N,N-dimethyl-N-([2-sperminecarboxamido]ethyl)-2,3-bis(dioleyloxy)-1-propaniminium pentahydrochloride), DOTAP (1,2-Dioleoyl-3-trimethylammonium propane), DMRIE (N-(2-hydroxyethyl)-N,N-dimethyl-2,3-bis(tetradecyloxy-1-propanaminiumbromide), DC-cholesterol (3β-[N—(N′,N′-dimethylaminoethane)-carbamoyl]cholesterol), DOTAP-cholesterol, GAP-DMORIE-DPyPE, and GL67A-DOPE-DMPE (2-Bis(dimethylphosphino)ethane)-polyethylene glycol (PEG). Examples of cationic lipids include, but are not limited to, 98N12-5, C12-200, DLin-KC2-DMA (KC2), DLin-MC3-DMA (MC3), XTC, MD1, and 7C1. Examples of neutral lipids include, but are not limited to, DPSC, DPPC (Dipalmitoylphosphatidylcholine), POPC (1-palmitoyl-2-oleoyl-sn-glycero-3-phosphocholine), DOPE, and SM (sphingomyelin). Examples of PEG-modified lipids include, but are not limited to, PEG-DMG (Dimyristoyl glycerol), PEG-CerC14, and PEG-CerC20. In some embodiments, the lipids may be combined in any number of molar ratios to produce a LNP. In some embodiments, the polynucleotide may be combined with lipid(s) in a wide range of molar ratios to produce an LNP.

[0470] The term “substituted”, unless otherwise indicated, refers to the replacement of one or more hydrogen radicals in a given structure with the radical of a specified substituent including, but not limited to: halo, alkyl, alkenyl, alkynyl, aryl, heterocyclyl, thiol, alkylthio, oxo, thioxy, arylthio, alkylthioalkyl, arylthioallcyl, alkylsulfonyl, alkylsulfonylalkyl, arylsulfonylalkyl, alkoxy, aryloxy, aralkoxy, aminocarbonyl, alkylaminocarbonyl, aiylaminocarbonyl, alkoxycarbonyl, aryloxycarbonyl, haloalkyl, amino, trifluoromethyl, cyano, nitro, alkylamino, arylamino, alkylaminoalkyl, aiylaminoalkyl, aminoalkylamino, hydroxy, alkoxyalkyl, carboxyalkyl, alkoxycarbonylalkyl, aminocarbonylalkyl, acyl, aralkoxycarbonyl, carboxylic acid, sulfonic acid, sulfonyl, phosphonic acid, aryl, heteroaryl, heterocyclic, and an aliphatic group. It is understood that the substituent may be further substituted. Exemplary●substituents include amino, alkylamino, and the like.

[0471] As used herein, the term “substituent” means positional variables on the atoms of a core molecule that are substituted at a designated atom position, replacing one or more hydrogens on the designated atom, provided that the designated atom's normal valency is not exceeded, and that the substitution results in a stable compound. Combinations of substituents and/or variables are permissible only if such combinations result in stable compounds. A person of ordinal), skill in the art should note that any carbon as well as heteroatom with valences that appear to be unsatisfied as described or shown herein is assumed to have a sufficient number of hydrogen atom(s) to satisfy the valences described or shown. In certain instances one or more substituents having a double bond (e.g., “oxo” or “═O”) as the point of attachment may be described, shown or listed herein within a substituent group, wherein the structure may only show a single bond as the point of attachment to the core structure of Formula (I). A person of ordinary skill in the art would understand that, while only a single bond is shown, a double bond is intended for those substituents.

[0472] The term “alkyl” refers to a straight or branched hydrocarbon chain radical, having from one to twenty carbon atoms, and which is attached to the rest of the molecule by a single bond. An alkyl comprising up to 10 carbon atoms is referred to as a C₁-C₁₀ alkyl, likewise, for example, an alkyl comprising up to 6 carbon atoms is a C₁-C₆ alkyl. Alkyls (and other moieties defined herein) comprising other numbers of carbon atoms are represented similarly. Alkyl groups include, but are not limited to, C₁-C₁₀ alkyl, C₁-C₉ alkyl, C₁-C₈ alkyl. C₁-C₇ alkyl, C₁-C₆ alkyl, C₁-C₅ alkyl, C₁-C₄ alkyl, C₁-C₃ alkyl, C₁-C₂ alkyl, C₂-C₈ alkyl, C₃-C₈ alkyl and C₄-C₈ alkyl. Representative alkyl groups include, but are not limited to, methyl, ethyl, n-propyl, 1-methylethyl (i-propyl), n-butyl, i-butyl, s-butyl, n-pentyl, 1,1-dimethylethyl (t-butyl), 3-methylhexyl, 2-methylhexyl, 1-ethyl-propyl, and the like. In some embodiments, the alkyl is methyl or ethyl. In some embodiments, the alkyl is —CH(CH₃)₂ or —C(CH₃)₃. Unless stated otherwise specifically in the specification, an alkyl group may be optionally substituted as described below. “Alkylene” or “alkylene chain” refers to a straight or branched divalent hydrocarbon chain linking the rest of the molecule to a radical group. In some embodiments, the alkylene is —C₁₋₁₂—, —CH₂CH₂—, or —CH₂CH₂CH₂—. In some embodiments, the alkylene is —CH₂—. In some embodiments, the alkylene is —CH₂CH₂—. In some embodiments, the alkylene is —CH₂CH₂CH₂—.

[0473] The term “alkenyl” refers to a type of alkyl group in which at least one carbon-carbon double bond is present. In one embodiment, an alkenyl group has the formula —C(R)═CR², wherein R refers to the remaining portions of the alkenyl group, which may be the same or different. In some embodiments, R is H or an alkyl. In some embodiments, an alkenyl is selected from ethenyl (i.e., vinyl), propenyl (i.e., allyl), butenyl, pentenyl, pentadienyl, and the like. Non-limiting examples of an alkenyl group include —CH═CH₂, —C(CH₃)═CH₂, —CH═CHCH₃, —C(CH₃)═CHCH₃, and —CH₂CH═CH₂.

[0474] The term “cycloalkyl” refers to a monocyclic or polycyclic non-aromatic radical, wherein each of the atoms forming the ring (i.e. skeletal atoms) is a carbon atom. In some embodiments, cycloalkyls are saturated or partially unsaturated. In some embodiments, cycloalkyls are spirocyclic or bridged compounds. In some embodiments, cycloalkyls are fused with an aromatic ring (in which case the cycloalkyl is bonded through a non-aromatic ring carbon atom). Cycloalkyl groups include groups having from 3 to 10 ring atoms. Representative cycloalkyls include, but are not limited to, cycloalkyls having from three to ten carbon atoms, from three to eight carbon atoms, from three to six carbon atoms, or from three to five carbon atoms. Monocyclic cycloalkyl radicals include, for example, cyclopropyl, cyclobutyl, cyclopentyl, cyclohexyl, cycloheptyl, and cyclooctyl. In some embodiments, the monocyclic cycloalkyl is cyclopropyl, cyclobutyl, cyclopentyl or cyclohexyl. In some embodiments, the monocyclic cycloalkyl is cyclopentenyl or cyclohexenyl. In some embodiments, the monocyclic cycloalkyl is cyclopenteny 1. Polycyclic radicals include, for example, adamantyl, 1,2-dihydronaphthalenyl, 1,4-dihydronaphthalenyl, tetrainyl, decalinyl, 3,4-dihydronaphthalenyl-.1 (2H)— one. spiro[2.2]pentyl, norbomyl and bicycle[1.1.1]pentyl. Unless otherwise stated specifically in the specification, a cycloalkyl group may be optionally substituted. Depending on the structure, a cycloalkyl group can be monovalent or divalent (i.e., a cycloalkylene group).

[0475] The term “heterocycle” or “heterocyclic” refers to heteroaromatic rings (also known as heteroaryls) and heterocycloallcyl rings (also known as heteroalicyclic groups) that includes at least one heteroatom selected from nitrogen, oxygen and sulfur, wherein each heterocyclic group has from 3 to 12 atoms in its ring system, and with the proviso that any ring does not contain two adjacent O or S atoms. A “heterocyclyl” is a univalent group formed by removing a hydrogen atom from any ring atoms of a heterocyclic compound. In some embodiments, heterocycles are monocyclic, bicyclic, polycyclic, spirocyclic or bridged compounds. Non-aromatic heterocyclic groups (also known as heterocycloalkyls) include rings having 3 to 12 atoms in its ring system and aromatic heterocyclic groups include rings having 5 to 12 atoms in its ring system. The heterocyclic groups include benzofused ring systems. Examples of non-aromatic heterocyclic groups are pyrrolidinyl, tetrahydrofuranyl, dihydrofuranyl, tetrahydrothienyl, oxazolidinonyl, tetrahydropyranyl, dihydropyranyl, tetrahydrothiopyranyl, piperidinyl, morpholinyl. thiomorpholinyl, thioxanyl, piperazinyl, aziridinyl, azetidinyl, oxetanyl, thietanyl, homopiperidinyl, oxepanyl, thiepanyl, oxazepinyl, diazepinyl, thiazepinyl, 1,2,3,6-tetrahydropyridinyl, pyrrolin-2-yl, pyrrolin-3-yl, indolinyl, 2H-pyranyl, 4Hpyranyl, dioxanyl, 1,3-dioxolanyl, pyrazolinyl, dithianyl, dithiolanyl, dihydropyranyl, dihydrothienyl, dihydrofuranyl, pyrazolidinyl, imidazolinyl, imidazoli diny I, 3-az.abicy cl o[3. 1.0]hexany 1,3-azabicyclo[4.1.0]heptanyl, 3 h-indolyl, indolin-2-onyl, isoindolin-1-onyl, isoindoline-1,3-dionyl, 3,4-dihydroisoquinolin-1(2H)-onyl, 3,4-dihydroquinolin-2(1H)-onyl, isoindoline-1,3-dithionyl, benzo[d]oxazol-2(3H)-onyl, 1H-benzo[d]imidazol-2(3H)-onyl, benzo[d]thiazol-2(3H)-onyl, and quinolizinyl. Examples of aromatic heterocyclic groups are pyridinyl, imidazolyl, pyrimidinyl, pyrazolyl, triazolyl, pyrazinyl, tetrazolyl, futyl, thienyl, isoxazolyl, thiazolyl, oxazolyl, isothiazolyl, pyrrolyl, quinolinyl, isoquinolinyl, indolyl, benzimidazolyl, benzofuranyl, cinnolinyl, indazolyl, indolizinyl, phthalazinyl, pyridazinyl, triazinyl, isoindolyl, pteridinyl, purinyl, oxadiazolyl, thiadiazolyl, furaz.anyl, benzofuraz.anyl, benzothiophenyl, benzothiazolyl, benzoxazolyl, quinazolinyl, quinoxalinyl, naphthyridinyl, and furopyridinyl. The foregoing groups are either C-attached (or Clinked) or N-attached where such is possible. For instance, a group derived from pyrrole includes both pyrrol-1-yl (N-attached) or pyrrol-3-yl (C-attached). Further, a group derived from imidazole includes imidazol-1-yl or imidazol-3-yl (both N-attached) or imidazol-2-yl, imidazol-4-yl or imidazol-5-yl (all C-attached). The heterocyclic groups include benzo-fused ring systems. Non-aromatic heterocycles are optionally substituted with one or two oxo (═O) moieties, such as pyrrolidin-2-one. In some embodiments, at least one of the two rings of a bicyclic heterocycle is aromatic. In some embodiments, both rings of a bicyclic heterocycle are aromatic.

[0476] The term “heterocycloalkyl” refers to a cycloalkyl group that includes at least one heteroatom selected from nitrogen, oxygen, and sulfur. Unless stated otherwise specifically in the specification, the heterocycloalkyl radical may be a monocyclic, or bicyclic ring system, which may include fused (when fused with an aryl or a heterowyl ring, the heterocycloalkyl is bonded through a non-aromatic ring atom) or bridged ring systems. The nitrogen, carbon or sulfur atoms in the heterocyclyl radical may be optionally oxidized. The nitrogen atom may be optionally quaternized. The heterocycloalkyl radical is partially or fully saturated. Examples of heterocycloalkyl radicals include, but are not limited to, dioxolanyl, thienyl[1,3]dithianyl, tetrahydroquinolyl, tetrahydroisoquinolyl, decahydroquinolyl, decahydroisoquinolyl, imidazolinyl, imidazolidinyl, isothiazolidinyl, isoxazolidinyl, morpholinyl, octahydroindolyl, octahydroisoindolyl, 2-oxopiperazinyl, 2-oxopiperidinyl, 2-oxopyrrolidinyl, oxazolidinyl, piperidinyl, piperazinyl, 4-piperidonyl, pyrrolidinyl, pyrazolidinyl, quinuclidinyl, thiazolidinyl, tetrahydrofuryl, trithianyl, tetrahydropyranyl, thiomorpholinyl, thiamorpholinyl, 1-oxothiomorpholinyl, 1,1-dioxo-thiomorpholinyl. The term heterocycloalkyl also includes all ring forms of carbohydrates, including but not limited to monosaccharides, disaccharides and oligosaccharides. Unless otherwise noted, heterocycloalkyls have from 2 to 12 carbons in the ring. In some embodiments, heterocycloalkyls have from 2 to 10 carbons in the ring. In some embodiments, heterocycloalkyls have from 2 to 10 carbons in the ring and 1 or 2 N atoms. In some embodiments, heterocycloalkyls have from 2 to 10 carbons in the ring and 3 or 4 N atoms. In some embodiments, heterocycloalkyls have from 2 to 12 carbons, 0-2 N atoms, 0-2 O atoms, 0-2 P atoms, and 0-1 S atoms in the ring. In some embodiments, heterocycloalkyls have from 2 to 12 carbons, 1-3 N atoms, 0-1 O atoms, and 0-1 S atoms in the ring. It is understood that when referring to the number of carbon atoms in a heterocycloalkyl, the number of carbon atoms in the heterocycloalkyl is not the same as the total number of atoms (including the heteroatoms) that make up the heterocycloalkyl (i.e. skeletal atoms of the heterocycloalkyl ring). Unless stated otherwise specifically in the specification, a heterocycloalkyl group may be optionally substituted. As used herein, the term “teterocycloalkylene” can refer to a divalent heterocycloalkyl group.

[0477] The term “heteroaryl” refers to an aryl group that includes one or more ring heteroatoms selected from nitrogen, oxygen and sulfur. The heteroaryl is monocyclic or bicyclic. Illustrative examples of monocyclic heteroaryls include pyridinyl, imidazolyl, pyrimidinyl, pyrazolyl, triazolyl, pyrazinyl, tetrazolyl, furyl, thienyl, isoxazolyl, thiazolyl, oxazolyl, isothiazolyl, pyrrolyl, pyridazinyl, triazinyl, oxadiazolyl, thiadiazolyl, furazanyl, indolizine, indole, benzofuran, benzothiophene, indazole, benzimidazole, purine, quinolizine, quinoline, isoquinoline, cinnoline, phthalazine, quinazoline, quinoxaline, 1,8-naphthyridine, and pteridine. Illustrative examples of monocyclic heteroaryls include pyridinyl, imidazolyl, pyrimidinyl, pyrazolyl, triazolyl, pyrazinyl, tetrazolyl, furyl, thienyl, isoxazolyl, thiazolyl, oxazolyl, isothiazolyl, pyrrolyl, pyridazinyl, triazinyl, oxadiazolyl, thiadiazolyl, and furazanyl. Illustrative examples of bicyclic heteroaryls include indolizine, indole, benzofuran, benzothiophene, indazole, benzimidazole, purine, quinolizine, quinoline, isoquinoline, cinnoline, phthalazine, quinazoline, quinoxaline, 1,8-naphthyridine, and pteridine. In some embodiments, heteroaryl is pyridinyl, pyrazinyl, pyrimidinyl, thiazolyl, thienyl, thiadiazolyl or furyl. In some embodiments, a heteroaryl contains 0-6 N atoms in the ring. In some embodiments, a heteroaryl contains 1-4 N atoms in the ring. In some embodiments, a heteroaryl contains 4-6 N atoms in the ring. In some embodiments, a heteroaryl contains 0-4 N atoms, 0-1 O atoms, 0-1 P atoms, and 0-1 S atoms in the ring. In some embodiments, a heteroaryl contains 1-4 N atoms, 0-1 O atoms, and 0-1 S atoms in the ring. In some embodiments, heteroaryl is a C₁-C₉ heteroaryl. In some embodiments, monocyclic heteroaryl is a C₁-C₅ heteroaryl. In some embodiments, monocyclic heteroaryl is a 5-membered or 6-membered heteroaryl. In some embodiments, a bicyclic heteroaryl is a C₆-C₉ heteroaryl. In some embodiments, a heteroaryl group is partially reduced to form a heterocycloalkyl group defined herein. In some embodiments, a heteroaryl group is fully reduced to form a heterocycloalkyl group defined herein.

[0478] As used herein, the “N/P ratio” is the molar ratio of ionizable (e.g., in the physiological pH range) nitrogen atoms in a lipid (or lipids) to phosphate groups in a nucleic acid molecular entity (or nucleic acid molecular entities), e.g., in a nanoparticle composition comprising a lipid component and an RNA. Ionizable nitrogen atoms can include, for example, nitrogen atoms that can be protonated at about pH 1, about pH 2, about pH 3, about pH 4, about pH5, about pH 6, about pH 7, about pH 7.5, or about pH 8 or higher. The physiological pH range can include, for example, the pH range of different cellular compartments (such as organs, tissues, and cells) and bodily fluids (such as blood, CSF, gastric juice, milk, bile, saliva, tears, and urine). In certain specific embodiments, the physiological pH range refers to the pH range of blood in a mammal, for example, from about 7.35 to about 7.45. Similarly, for phosphate charge neutralizers that have one or more ionizable nitrogen atoms, the N/P ratio can refer to a molar ratio of ionizable nitrogen atoms in the phosphate charge neutralizer to the phosphate groups in a nucleic acid. In some embodiments, ionizable nitrogen atoms refer to those nitrogen atoms that are ionizable within a pH range between 5 and 14.

[0479] It is further contemplated that the LNP formulations that encapsulate the gRNAs and mRNAs drug substances described herein may be modified to include GalNAc lipid formulations such as those disclosed in co-owned U.S. patent application Ser. No. 17/192,709 filed on Mar. 4, 2021 with a parallel PCT application being filed on same date having International Application Number PCT/US21/20955. Employment of such GalNAc lipid formulations are understood to be capable of enhancing LNP uptake in LDL-R deficient cells, such as those associated with heterozygous and homozygous familial hypercholesterolemia patient populations.

[0480] For the payload that does not contain a phosphate group, the N/P ratio can refer to a molar ratio of ionizable nitrogen atoms in a lipid to the total negative charge in the payload. For example, the N/P ratio of an LNP composition can refer to a molar ratio of the total ionizable nitrogen atoms in the LNP composition to the total negative charge in the payload that is present in the composition.

[0481] As used herein, amino lipids can contain at least one primary, secondary or tertiary amine moiety that is protonatable (or ionizable) between pH range 4 and 14. In some embodiments, the amine moiety/moieties function as the hydrophilic headgroup of the amino lipids. When most of the amine moiety(ies) of an amino lipid (or amino lipids) in a nucleic acid-lipid nanoparticle formulation is protonated at physiological pH, then the nanoparticles can be termed as cationic lipid nanoparticle (cLNP). When most of the amine moiety(ies) of an amino lipid (or amino lipids) in a nucleic acid-lipid nanoparticle formulation is not protonated at physiological pH but can be protonated at acidic pH, endosomal pH for example, can be termed as ionizable lipid nanoparticle (iLNP). The amino lipids that constitute cLNPs can be generally called cationic amino lipids (cLipids). The amino lipids that constitute iLNPs can be called ionizable amino lipids (iLipids). The amino lipid can be an iLipid or a cLipid at physiological pH.

[0482] Additional LNPs can be found in PCT Application Publication NO. WO2021/207712, which is hereby incorporated by reference in its entirety.

### GalNAc-LNPs

[0483] In some aspects, described herein are methods of preparing a formulation comprising GalNAc-lipid nanoparticles (GalNAc-LNPs). In some embodiments, the nanoparticles comprise (i) one or more nucleic acid active agents, (ii) one or more lipid excipients selected from sterol or a derivative thereof, a phospholipid, a stealth lipid, and an amino lipid, and/or (iii) a GalNAc-lipid receptor targeting conjugate. In some embodiments, the methods can comprise providing a first solution comprising the one or more nucleic acid active agents in aqueous buffer. In some embodiments, the methods can comprise providing a second solution comprising (i) at least one of the one or more lipid excipients and (ii) at least a portion of the receptor targeting conjugate in a water-miscible organic solvent. In some embodiments, the methods can comprise combining an antioxidant with said first solution; In some embodiments, the methods can comprise mixing said first solution and said second solution. In some embodiments, the methods can comprise incubating a mixture of said first and second solutions to form GalNAc-LNP. In some embodiments, the methods can comprise carrying out one or more processes selected from dilution, buffer exchange, concentration, filtration, freezing, thawing, incubation and GalNAc-LNP evaluation.

[0484] In some embodiments steps of the methods are performed simultaneously. In some embodiments, steps of the methods are performed sequentially.

[0485] In some embodiments, the aqueous buffer comprises polyethylene glycol. In some embodiments, the polyethylene glycol has a number average molecular weight ranging from about 200 to about 1000 (for example, about 200, about 400, about 500, about 600, or about 1000). In some embodiments, the methods further comprise diluting GalNAc-Lipid in an aqueous solution to produce a diluted GalNAc-LNP solution. In some embodiments, the GalNAc-LNP is configured for direct administration to a subject. In some embodiments, the methods further comprise diluting said GalNAc-LNPs in a solution one or more times. In some embodiments, the methods further comprise exchanging said water-miscible organic solvent with a buffer solution one or more times. In some embodiments, the methods further comprise concentrating said GalNAc-LNPs. In some embodiments, the concentrating comprises passing said GalNAc-LNPs through a membrane. In some embodiments, the methods further comprise a second concentrating process, wherein the second concentrating comprises concentrating said GalNAc-LNP by passing the exchanging buffer through a membrane.

[0486] In some embodiments, the methods further comprise filtering said GalNAc-LNPs through a membrane. In some embodiments, the methods further comprise a second incubation after step e, wherein incubation occurs from about 1 minute to about 120 minutes. In some embodiments, the methods further comprise storing said GalNAc-LNPs at a temperature of about −80 degrees Celsius (° C.) to about 25° C. In some embodiments, the methods further comprise storing said GalNAc-LNPs at a temperature of about −80 degrees Celsius (° C.) or from about 2° C. to about 8° C.

[0487] In some embodiments, the methods further comprise comprising (i) thawing stored GalNAc-LNPs (ii) pooling GalNAc-LNPs (iii) diluting GalNAc-LNPs in a solution and (iv) filtering said GalNAc-LNPs through a membrane prior to administering a dose of said GalNAc-LNPs to a subject. In some embodiments, the order of performing step (iii) and (iv) are reversed. In some embodiments, said miscible organic solvent is ethanol. In some embodiments, said antioxidant is ethylenediaminetetraacetic acid (EDTA). In some embodiments, said second solution comprises all the receptor targeting conjugate. In some embodiments, at least a portion of said receptor targeting conjugate is combined with one or more lipids prior to the mixing step.

[0488] In some embodiments, the mixing occurs in an inline mixer, cross mixer, or T mixer apparatus. In some embodiments, the mixing comprises laminar mixing, vortex mixing, turbulent mixing, or a combination thereof. In some embodiments, the methods further comprise using a tangential flow filtration (TFF) process to concentrate said GalNAc-LNPs. In some embodiments, the methods further comprise using a chromatography, dialysis, or a TFF process to perform buffer exchange.

[0489] In some embodiments, the receptor targeting conjugate comprises one or more N-acetylgalactosamine (GalNAc) or GalNAc derivatives. In some embodiments, the mixing is performed by an inline mixing apparatus having a first mixing chamber that includes a first port that separately introduces said first solution to said first mixing chamber and a second port that separately and simultaneously introduces said second solution into said first mixing chamber. In some embodiments, said first solution comprises RNA. In some embodiments, a concentration (mol %) of said GalNAc-lipid receptor targeting conjugate is about 0.01 mol % to about 10 mol %. In some embodiments, said neutral lipid is distearoylphosphatidylcholine (DSPC). In some embodiments, said stealth lipid is polyethylene glycol-dimyristoyl glycerol (PEG-DMG). In some embodiments, said stealth lipid concentration in said second solution is 0 mol % to about 5 mol %. In some embodiments, said nucleic acid agent concentration is about 0.1 to about 5 mg/mL (e.g. about 0.1, 0.25, 0.5, 0.75, 1, 1.5, 2, 2.5, 3, 4, or 5 mg/mL). In some embodiments, said mixture is incubated for about 1 minute to about 24 hours. In some embodiments, said mixture is incubated for about 1 minute to about 120 minutes. In some embodiments, said mixture is incubated for about 1 hour. In some embodiments, a final GalNAc-LNP solution comprises Tris buffer.

[0490] In some embodiments, a final GalNAc-LNP solution further comprises a cryoprotectant. In some embodiments, said cryoprotectant is sucrose. In some embodiments, a concentration of said cryoprotectant in said final solution is about 0.1 mM to about 500 mM. In some embodiments, a concentration of said cryoprotectant in said final solution is about 150 mM to about 500 mM. In some embodiments, a concentration of said cryoprotectant is in said final solution is about 300 mM.

[0491] In some embodiments, GalNAc-LNPs are stored at a temperature of about −80 degrees Celsius (° C.). In some embodiments, a final GalNAc-LNP solution does not further comprise a cryoprotectant. In some embodiments, said GalNAc-LNPs are stored from about 2° C. to about 8° C. In some embodiments, said GalNAc-LNP are in a solution with a pH from about 6 to about 9. In some embodiments, said GalNAc-LNP are in solution with a pH of about 7-8 (e.g. 7-8, 7.2-7.8, 7.3-7.7, or 7.4-7.6).

[0492] In some embodiments, the methods further comprise introducing said receptor targeting conjugate in said second solution at a concentration of at least 0.01 (e.g. at least 0.01, 0.05, 0.1, or 0.5) mol % of total volume. In some embodiments, the methods further comprise introducing said receptor targeting conjugate in said second solution at a concentration of at least 1 mol % of total volume. In some embodiments, the methods further comprise introducing said receptor targeting conjugate in said second solution at a concentration of at least 3 mol % of total volume. In some embodiments, the methods further comprise introducing said receptor targeting conjugate in said second solution at a concentration of at least 5 mol % of total volume.

[0493] In some embodiments, the methods further comprise introducing said receptor targeting conjugate in said second solution at a concentration of at least 7 mol % of total volume. In some embodiments, the methods further comprise introducing said receptor targeting conjugate in said second solution at a concentration of at least 9 mol % of total volume. In some embodiments, the methods further comprise introducing said receptor targeting conjugate in said second solution at a concentration of at least 10 mol % of total volume.

[0494] In another aspect, described herein are GalNAc-LNPs which are capable of being prepared by methods described herein. In some embodiments, a distribution of GalNAc-lipid across said LNP is substantially uniform. In some embodiments, wherein a GalNAc-lipid is present in the GalNAc-LNP at a concentration of about 0.01-0.5 mol %.

[0495] In another aspect, described herein are GalNAc-LNPs comprising a receptor targeting conjugate which comprises a compound of Formula (II):

[chemical structure]

[0496] wherein, A is a receptor targeting moiety;
[0497] each L¹, L², L³, L⁴, L⁵, L⁶, L⁷, L⁸, L⁹, L¹⁰, and L¹², is independently substituted or unsubstituted C₁-C₁₂ alkylene, substituted or unsubstituted C₁-C₁₂ heteroalkylene, substituted or unsubstituted C₂-C₁₂ alkenylene, substituted or unsubstituted C₂-C₁₂ alkynylene, —(CH₂CH₂O)ₘ—, —(OCH₂CH₂)ₘ—, —O—, —S—, —S(═O)—, —S(═O)₂—, —S(═O)(═NR¹)—, —C(═O)—, —C(═N—OR¹)—, —C(═O)O—, —OC(═O)—, —C(═O)C(═O)—, —C(═O)N(R¹)—, —N(R¹)C(═O)—, —OC(═O)N(R¹)—, —N(R¹)C(═O)O—, —N(R¹)C(═O)N(R¹)—, —C(═O)N(R¹)C(═O)—, —S(═O)₂N(R¹)—, —N(R¹)S(═O)₂—, —N(R¹)—, —N(OR¹)—, —O[(P═O)O—]O—, —O[(P═O)S—]O—, —(CH₂)ₚ—O—, —O—(CH₂)ₚ—O—, —O—(CH₂)ₚ—, —S—S—, or a bond;
   [0498] L¹¹ is —(CH₂CH₂O)ₙ—, —(OCH₂CH₂)ₙ—, or a bond;
   [0499] each R¹ is independently H or substituted or unsubstituted C₁-C₆ alkyl;
   [0500] R is a lipophilic organic residue;
   [0501] m is an integer selected from 1 to 10;
   [0502] n is an integer selected from 1 to 200; and
[0503] p is an integer selected from 1 to 200.

[0504] In some embodiments, the receptor targeting conjugate is selected from the following:

[chemical structure]

[0505] wherein each of the p and q is independently an integer from 1 to 5, and n is an integer from 1 to 50;

[chemical structure]

[chemical structure]

[0506] wherein each of the p and q is independently an integer from 1 to 5, and n is an integer from 1 to 50;

[chemical structure]

[chemical structure]

[0507] wherein n is an integer from 1 to 50;

[chemical structure]

[chemical structure]

[0508] wherein each of the p and q is independently an integer from 1 to 5, and n is an integer from 1 to 50;

[chemical structure]

[0509] wherein each of the p and q is independently an integer from 1 to 5, and n is an integer from 1 to 50;

[chemical structure]

[0510] wherein each of the p and q is independently an integer from 1 to 5, and n is an integer from 1 to 50;

[chemical structure]

[chemical structure]

[chemical structure]

[chemical structure]

[0511] In some embodiments, the receptor targeting conjugate is:

[chemical structure]

[0512] In another aspect described herein are pharmaceutical formulations comprising GalNAc-LNPs, the GalNAc-LNPs comprising:
[0513] (i) one or more nucleic acid active agents;
[0514] (ii) one or more lipid excipients selected from sterol or a derivative thereof, a phospholipid, a stealth lipid, and an amino lipid; and
[0515] (iii) a GalNAc-lipid receptor targeting conjugate, wherein the GalNAc-LNP comprises an excipient mol % ratio selected from Table 11.

[0516] For the payload that does not contain a phosphate group, the N/P ratio can refer to a molar ratio of ionizable nitrogen atoms in a lipid to the total negative charge in the payload. For example, the N/P ratio of an LNP composition can refer to a molar ratio of the total ionizable nitrogen atoms in the LNP composition to the total negative charge in the payload that is present in the composition.

[0517] As used herein, amino lipids can contain at least one primary, secondary or tertiary amine moiety that is protonatable (or ionizable) between pH range 4 and 14. In some embodiments, the amine moiety/moieties function as the hydrophilic headgroup of the amino lipids. When most of the amine moiety(ies) of an amino lipid (or amino lipids) in a nucleic acid-lipid nanoparticle formulation is protonated at physiological pH, then the nanoparticles can be termed as cationic lipid nanoparticle (cLNP). When most of the amine moiety(ies) of an amino lipid (or amino lipids) in a nucleic acid-lipid nanoparticle formulation is not protonated at physiological pH but can be protonated at acidic pH, endosomal pH for example, can be termed as ionizable lipid nanoparticle (iLNP). The amino lipids that constitute cLNPs can be generally called cationic amino lipids (cLipids). The amino lipids that constitute iLNPs can be called ionizable amino lipids (iLipids). The amino lipid can be an iLipid or a cLipid at physiological pH.

### Method of Treatment

[0518] The present disclosure further provides a method for treating or preventing an atherosclerotic cardiovascular disease in a subject in need thereof, the method comprising administering to the subject a therapeutically effective amount of the guide nucleic acid, gene editing system, or the pharmaceutical composition disclosed herein. The subject in need thereof can be a subject that needs gene editing in ANGPTL3 gene. The gene editing system disclosed herein can achieve the editing in ANGPTL3 gene in a subject with high on-target efficiency but low off-target effect. The guide nucleic acid can direct the gene editor protein to affect a nucleobase alternation in an ANGPTL3 gene in the subject. The gene editing or base alteration achieved by the disclosed gene editing system can occur in at least 35% of whole liver cells in the subject as measured by next generation sequencing or Sanger sequencing, thereby treating or preventing the condition in the subject.

[0519] The methods disclosed herein can achieve at least about 20%, at least about 30%, at least about 40%, at least about 50%, at least about 60%, at least about 70%, at least about 80%, or at least about 90% of on-target editing in an ANGPTL3 gene in the subject. The methods disclosed herein can achieve at least 40% of on-target editing in an ANGPTL3 gene in the subject. The methods disclosed herein can achieve at least about 45% of on-target editing in an ANGPTL3 gene in the subject. The methods disclosed herein can achieve at least about 50% of on-target editing in an ANGPTL3 gene in the subject. The methods disclosed herein can achieve at least about 55% of on-target editing in an ANGPTL3 gene in the subject. The methods disclosed herein can achieve at least about 60% of on-target editing in an ANGPTL3 gene in the subject. The methods disclosed herein can achieve at least about 65% of on-target editing in an ANGPTL3 gene in the subject. The methods disclosed herein can achieve about 50% of on-target editing in an ANGPTL3 gene in the subject. The methods disclosed herein can achieve about 55% of on-target editing in an ANGPTL3 gene in the subject. The methods disclosed herein can achieve about 60% of on-target editing in an ANGPTL3 gene in the subject.

[0520] The methods disclosed herein can achieve at least about 40%, at least about 50%, at least about 60%, at least about 70%, at least about 80%, at least about 90%, or at least about 95% of reductions in plasma ANGPTL3 protein in a subject. The methods disclosed herein can achieve at least about 70% of reductions in plasma ANGPTL3 protein in a subject. The methods disclosed herein can achieve at least about 80% of reductions in plasma ANGPTL3 protein in a subject. The methods disclosed herein can achieve at least about 90% of reductions in plasma ANGPTL3 protein in a subject. The methods disclosed herein can achieve at least about 95% of reductions in plasma ANGPTL3 protein in a subject. The methods disclosed herein can achieve at least about 96% of reductions in plasma ANGPTL3 protein in a subject. The methods disclosed herein can achieve at least about 97% of reductions in plasma ANGPTL3 protein in a subject. The methods disclosed herein can achieve at least about 98% of reductions in plasma ANGPTL3 protein in a subject. The methods disclosed herein can achieve at least about 99% of reductions in plasma ANGPTL3 protein in a subject.

[0521] The methods disclosed herein can achieve at least about 20%, at least about 30%, at least about 40%, at least about 50%, at least about 60%, at least about 70%, or at least about 80% of reductions in HDL-C in a subject. The methods disclosed herein can achieve at least about 20% of reductions in HDL-C in a subject. The methods disclosed herein can achieve at least about 30% of reductions in HDL-C in a subject. The methods disclosed herein can achieve at least about 40% of reductions in HDL-C in a subject. The methods disclosed herein can achieve at least about 50% of reductions in HDL-C in a subject. The methods disclosed herein can achieve at least about 60% of reductions in HDL-C in a subject.

[0522] The methods disclosed herein can achieve at least about 10%, at least about 20%, at least about 30%, at least about 40%, at least about 50%, at least about 60%, or at least about 70% of reductions in plasma triglycerides in a subject. The methods disclosed herein can achieve at least about 10% of reductions in plasma triglycerides in a subject. The methods disclosed herein can achieve at least about 20% of reductions in plasma triglycerides in a subject. The methods disclosed herein can achieve at least about 30% of reductions in plasma triglycerides in a subject. The methods disclosed herein can achieve at least about 40% of reductions in plasma triglycerides in a subject. The methods disclosed herein can achieve at least about 50% of reductions in plasma triglycerides in a subject. The methods disclosed herein can achieve at least about 60% of reductions in plasma triglycerides in a subject.

[0523] The methods disclosed herein can effectively achieve on-target editing in an ANGPTL3 gene, reducing plasma ANGPTL3 protein, reducing HDL-C levels, and/or reducing plasma triglycerides in a subject without serious safety and/or toxicity concerns.

### EXAMPLES

[0524] The following examples are not intended to limit the scope of what the inventors regard as various aspects of the present invention.

[0525] Generally, as to the data presented herein, it should be understood that while various gRNA:mRNA ratios may be employed, unless otherwise expressly specified to the contrary, the gene editing systems set forth in the studies and data described and presented herein, employ 1:1 gRNA to mRNA ratio by weight. Similarly, while various dosing methods may be employed, unless otherwise expressly specified to the contrary, dosing specified by mg/kg in the studies and data described and presented herein refers to mg of the combined total gRNA and mRNA per kg weight of the dosed subject that is contained in the LNPs and intravenously dosed to the subject.

### Example 1. In-Vitro Potency Study Comparing PCSK9 Editing Percentage of Human Primary Liver Cells Vs. Non-Human Primary Liver Cells at Varied Doses of PCSK9 Base Editor

[0526] FIG. 1 presents data illustrating the percent editing of PCSK9 gene in primary human hepatocytes (PHH) as comparted to primary non-human primate hepatocytes (e.g., primary cyno hepatocytes (PCH)) using the LNP base editor formulation embodiments described herein. The vertical axis represents the percent editing of PCSK9 gene measured using next generation sequencing (NGS) to quantitate the A to G edits at the PCSK9 gene editing target site. The horizontal axis plots the log of the concentration of gRNA GA346 that the cells were exposed to. The LNP administered to the PHH and PCH cells comprised a payload of mRNA MA004 and guide RNA GA346 at 1:1 mRNA:gRNA weight ratio and titrated at different concentrations against multiple lots of primary human hepatocytes and primary non-human primate hepatocytes. The concentrations titrated against primary human hepatocytes extended from 3.025 to 3.469 nM of gRNA. The concentrations titrated against primary non-human hepatocytes extended from 9.035 to 11.68 nM of gRNA. For each group of cells, the percent editing of PCSK9 gene was analyzed at each gRNA concentration and plotted on the graph set forth in FIG. 1. The relative potency, as illustrated by FIG. 1, indicates that the formulation has notably greater potency in human primary liver cells than in non-human primate liver cells, which supports the likelihood that the formulation, when administered to humans, is capable of producing PCSK9 editing in human liver cells comparable or superior to those seen in the NHP studies described herein while using clinical doses meaningfully below those used in the NHP studies described herein.

### Example 2. In-Vivo Long-Term Non-Human Primate Study Dosed Intravenously with PCSK9 LNP Formulated with a Payload of ABE mRNA MA004 and Guide RNA GA346

[0527] Illustrated in FIGS. 2-7 is a study protocol (FIG. 2) and data generated from the study setting forth PCSK9 editing percent change from baseline through liver biopsy assessing whole liver DNA editing at day 15 post infusion and PCSK9 protein reduction at day 14 post infusion (FIG. 3), PCSK9 protein reduction over an extended period of time post infusion (FIG. 4), LDL-C reduction over an extended period of time post infusion (FIG. 5), ALT enzyme levels over an extended period of time post infusion (FIG. 6), and fasting glucose levels over an extended time period post infusion (FIG. 7).

[0528] As illustrated in FIG. 2, the study involved a first group of 4 NHPs intravenously infused with a single dose of 0.75 mg/kg, a second group of 22 NHPs intravenously infused with a single dose of 1.5 mg/kg, and third group (“vehicle control”) of 10 NHPs intravenously infused with a single dose of the same LNP delivery vehicle without the gRNA and mRNA drug substance payload. The 0.75 mg/kg and 1.5 mg/kg doses were calculated using the total RNA drug substance payload (i.e., the combined weight of mRNA and gRNA) and does not include the weight of the lipid nanoparticle delivery vehicle. Thus, for example a dose of 0.75 mg/kg equates to 0.75 mg of combined mRNA and gRNA weight being intravenously infused in the NHP for each kilogram weight of the NHP being dosed. Each group of NHPs was dosed via a single intravenous infusion using the same LNP delivery vehicle, previously described herein. For groups 1 and 2, the formulated LNP comprised a payload of mRNA MA004 and guide RNA GA346 at a 1:1 mRNA:gRNA weight ratio. For the vehicle control group 3, the 10 NHPs were dosed with the same LNP as in groups 1 and 2, except that the LNP dosed did not contain any drug substance (i.e., no mRNA or gRNA). Blood serum samples from each NHP group were collected just prior to dosing and at the intervals noted in FIGS. 2-7 and analyzed for primary endpoints including: (1) blood PCSK9 levels, (2) Blood LDL-C levels as well as safety endpoints, including (1) liver function testing, (2) glucose homeostasis, and (3) adenine deaminase (ADAs) levels, which are used as an indicator of cytokine activity. Liver tissue samples, via liver biopsy, were collected from each group of NHPs at regular intervals and were analyzed for primary endpoints including whole liver PCSK9 DNA editing.

[0529] FIG. 3 is a waterfall plot of percent PCSK9 reduction in blood as compared to baseline at day 14 post infusion. The left side of the plot illustrates the 10 vehicle control group NHPs and the right side of the plot illustrates the 22 NHPs that were dosed with 1.5 mg/kg of drug substance. Each bar on the plot represents an individual NHP. As illustrated in the plot the mean PCSK9 reduction of the 22 NHPs in group was approximately 87% at 14 days post infusion. The high level of consistency in PCSK9 reduction is indicated in the plot across all 22 dosed animals as compared to the 10 vehicle treated NHP which PCSK9 blood levels scatter above and below pre-dosed baseline.

[0530] FIG. 4 is a graph representing the change in blood PCSK9 levels in the three groups of NHPs over an extended period (measured from post infusion) as a percentage change from baseline (indicated as 0 on the graph). Blood PCSK9 levels were analyzed from the blood serum collected from the NHPs at the intervals indicated in the graph of FIG. 4. As illustrated in FIG. 4, consistent and durable dose response at the two dose levels shown (0.75 mg/kg and 1.5 mg/kg) was observed and provides further confirmation to the study described in the 3 mg/kg dose NHP study described in PCT Application Publication NO. WO2021/207712, which is hereby incorporated by reference in its entirety.

[0531] FIG. 5 is a graph illustrating the change in blood LDL-C as a percentage change from pre-dosed baseline at the same intervals and over the same extended period of time post infusion as in FIG. 4. As illustrated in FIG. 5, blood LDL-C is down greater than 60% at the higher dose 1.5 mg/kg in the 22 NHPs of group 2 and reduced greater than 40% at the lower dose of 0.75 mg/kg of 4 NHPs in group 1. The vehicle control group 3 of 10 NHPs remained near post infusion baseline. Notably, the LDL-C reductions in group 1 and 2 were observed to be durability sustained over the test period thereby further supporting that a single dose of the drug substances described herein are capable of durably decreasing lifetime exposure to blood lipids (LDL-C), which are known to cause ASCVD, and thereby provides further confirmation of the described in connection with the study described in PCT Application Publication NO. WO2021/207712, which is hereby incorporated by reference in its entirety.

[0532] FIG. 6 is a graph illustrating Alanine Aminotransferase (ALT) levels of the three groups of NHPs in the study as compared to pre-dosed baseline at the same intervals and over the same extended period of time post infusion as in FIGS. 4-5. ALT is a liver enzyme that is commonly used as a marker to measure liver inflammation or damage and is here presented as measure of safety of the dosed drug product and substances described herein. As illustrated in FIG. 6, ALT levels, as measured against pre-dosed baseline rise immediately after dosing and then resolve to baseline levels by about day 14 post infusion and are maintained at pre-dosed baseline levels for the remainder of the extended study period, which provides further confirmation of the study described in connection with in PCT Application Publication NO. WO2021/207712, which is hereby incorporated by reference in its entirety, that no long-term effects on liver enzymes is observed following base editing of PCSK9 gene.

[0533] FIG. 7 is a graph illustrating fasting glucose levels of the three groups of NHPs in the study again taken at the same intervals and over the same extended period of time post infusion as in FIGS. 4-6. Glucose homeostasis was assessed via a glucose bioassay. Although prior therapies targeting PCSK9 have not shown impact on glucose homeostasis, given the differences between those prior therapies and the bae editing therapy modality that is the subject of this application, this analysis was undertaken to affirmatively rule out a theoretical risk of impacting glucose homeostasis by systemic PCSK9 inhibition. As illustrated in FIG. 7, glucose homeostasis was not perturbed following base editing of PCSK9 gene of the dosed NHPs. Further, although not illustrated in FIG. 7, a separate sampling of the study NHPs was conducted during ad libitum eating on several days and no impact on post-prandial glucose levels were observed.

### Example 3. Partial Hepatectomy Mouse Model to Assess Durability of PCSK9 Base Editor in Regenerated Liver Cells

[0534] Illustrated in FIGS. 8-10 is a mouse study protocol (FIG. 8) and data generated from the study illustrating the durability of liver editing in regenerated PCSK9 edited liver cells (FIGS. 9-10). As illustrated in FIGS. 8-10, four groups of mice were dosed with a single intravenous infusion of the same LNP delivery vehicle described herein and in connection with Example 2. The first group of mice were dosed via intravenous infusion with 0.5 mg/kg, i.e., 0.5 mg of drug substance RNA (mRNA and guide RNA) at a 1:1 mRNA:guide RNA weight ratio) per kilogram weight of mouse and a partial hepatectomy was performed on day 11 post infusion of the mice in first group and resected lobes of the liver obtained from that surgery collected and analyzed for PCSK9 editing. The second group of mice were dosed via intravenous infusion with the same 0.5 mg/kg as the first group and a sham partial hepatectomy surgery was performed on day 11 post infusion of the mice in this second group. The third group of mice were dosed with the same LNP vehicle minus the mRNA MA004 and guide RNA GA257 payload and a partial hepatectomy surgery was performed on day 11 post infusion of the mice in this third group. A fourth group of mice were dosed with the same LNP vehicle minus the mRNA MA004 and guide RNA GA257 payload and a sham hepatectomy surgery was performed on day 11 post infusion of the mice in this fourth group. Blood serum was collected prior to dosing, 7 days post infusion, and at intervals identified in FIG. 10 and used to measure blood PCSK9 protein. On day 22 post infusion, a portion of each group of mice were sacrificed and the liver tissue in those mice was analyzed for PCSK9 editing. On day 95 post infusion, the remaining mice in the study were sacrificed and the liver tissue in those mice was analyzed for PCSK9 editing.

[0535] The lower, right graph of FIG. 8 depicts the time-dependent variation of the liver/brain ratio after partial hepatectomy in the mice that are the subject of the study. As indicated therein a nearly normal ratio of Liver/Brain in the mice was found to be re-established approximately 9 days after partial hepatectomy.

[0536] The group 1 mice are referred to in FIG. 10 as “0.5 mg/kg+partial hepatectomy.” The group 2 mice are referred to in FIG. 10 as “0.5 mg/kg+sham.” The group 3 mice are referred to in FIG. 10 as “vehicle+partial hepatectomy.” The group 4 mice are referred to in FIG. 10 as “vehicle+sham.” As illustrated in FIG. 1, reduction in blood PCSK9 measured from the collected blood serum samples was maintained following partial hepatectomy of group 1 and group 2 mice even after multiple liver regeneration cycles post partial hepatectomy.

[0537] Illustrated in FIG. 9 is PCSK9 editing data assessed via NGS (as previously described) from the liver samples taken from the resected lobes of the dosed mice that underwent partial hepatectomy and at necropsy of the mice at 22 and 95 day post infusion, As illustrated on the left graph of FIG. 9, the sham surgery group 2 mice that was dosed with 0.5 mg/kg maintained an PCSK9 editing percentage of around 60 percent in the mice sacrificed at both 22 and 95 days post infusion. As illustrated in right side graph of FIG. 9, the group 1 mice that was dosed with 0.5 mg/kg and underwent a partial hepatectomy at day 11 also maintained a PCSK9 editing percentage of around or greater than 60 percent and that PCSK9 editing percentage was comparable to the PCSK9 editing percentages assessed from the resected lobes retained from those mice from the partial hepatectomy surgery on day 11 post infusion. This study therefore confirms that base editing of PCSK9 using the dosed drug formulations described herein is sustained in regenerated liver lobes of treated subjects.

### Example 4. Confirmation of No Evidence of Editing Sperm in Sexually Mature Male NHPs

[0538] Illustrated in FIG. 11 is data from an NHP study assessing the level of PCSK9 editing in sperm of sexually mature male NHPs. In this study, 6 sexually mature male NHP were intravenously infused with the same single dose of 1.5 mg/kg that was used in the second group of 22 NHPs in Example 2. A seventh sexually mature male vehicle control monkey was intravenously dosed with the same LNP delivery vehicle without the gRNA GA346 and mRNA MA004 drug substance payload vehicle used in the third group (the “vehicle control”) of 10 NHPs in Example 2. Sperm samples were collected prior to dosing and 11 weeks after treatment which is greater than one full cycle of spermatogenesis. Quantitation of the levels of editing was done using a highly sensitive targeted amplicon assay optimized to have a high sensitivity. As illustrated in FIG. 11, no evidence of editing of the germline sperm was observed as the levels of editing quantitated in the sperm samples of the subject NHPs were similar between control and treated animals.

### Example 5. Off-Target Assessment

[0539] Illustrated in FIGS. 12-15 is a study protocol and data generated therefrom assessing potential off-target candidate sites of the PCSK9 base editor formulations described herein. FIG. 12 is a schematic illustrating the experimental methods used for evaluating the presence of actual off-target editing by the PCSK9 base editor formulations described herein. On the left is a description of the discovery methods to identify potential candidate off-targets sites using multiple techniques. As illustrated therein, the discovery assays comprise the One-Seq assay (Ref: https://www.biorxiv.org/content/10.1101/2021.04.05.438458v1) and an ABE-digenome assay. In One-Seq a synthetic library of tens of thousands of dsDNA molecules corresponding to sites of potential off-target activity based on homology are evaluated in vitro for cutting at a high dose of base editor protein. In ABE-digenome-seq, genomic DNA from primary liver cells are extracted and digested in vitro with ABE protein and potential sites of base modification are determined by a genome wide next gen sequencing analysis. Both of these assays yield sites that could be cleaved via off-target activity. To further guard against potential false negatives, a bioinformatic assessment is made of sites with a high degree of homology that were not identified in either One-Seq or ABE-Digenome discovery assay and these sites are also included in subsequent panel based validation assays.

[0540] Once the potential off-target sites are identified (which can number in the hundreds to thousands) with these discovery methods, an evaluation for the presence of actual off target editing was performed using a highly sensitive hybrid capture assay. This evaluation was performed in multiple primary cells from multiple donors and represent multiple tissues that could be exposed following systemic treatment with the PCSK9 base editor formulations described herein. These tissues include liver, spleen, adrenal cells, and hematopoietic stem cells, which is representative of a highly proliferative cell.

[0541] Using the foregoing, potential off-target activity panels were prepared, and hybrid capture methods were used to assay hundreds to thousands of sites for off-target activity. The sites corresponding to the panel were enriched by capture using RNA probes. The enriched DNA is then processed for sequencing and quantitation of base modification across all the panel sites.

[0542] As illustrated in FIG. 13, the assays employed by this methodology result in a highly sensitive hybrid capture off target validation assay that has extremely low background with greater than 99% of the panel members having less than 0.1% of non-reference sequence (referred to as alt allele). The clean sensitivity of this hybrid capture assay as herein optimized for detecting off-target activity has allowed for profiling and detection of potential off-target candidate sites with a high level of sensitivity and is capable of scaling to accommodate thousands of sites.

[0543] FIGS. 14-15 are jitter plots generated from the foregoing method that illustrate the quantitation of editing levels across base positions for a window of 10 bases around the target base for the top 244 candidate off-target sites in multiple cells. The jitter plot depicted in FIG. 14 represent assessment against primary human hepatocytes across a single PHH lot. As illustrated by comparison of the human liver cells treated with LNP formulation comprising a payload of mRNA MA004 and guide RNA GA346 as compared to untreated human livers, there is no detectable off-target editing in primary hepatocytes among any of the top 244 candidate sites. Similarly, the jitter plot depicted in FIG. 15 represents assessment against primary human spleen cells across a single lot of primary splenic endothelial cells. As illustrated by comparison between the primary human spleen cells transfected (or treated) with mRNA MA004 and guide RNA GA346 as compared to untreated primary human spleen cells, there is no detectable off-target editing observed in primary human spleen cells among any of the top 244 candidate sites.

### Example 6. Bio-Distribution of Editing of PCSK9

[0544] FIG. 16 represents data from a bio-distribution study of NHPs dosed with an LNP constituted with an ABE mRNA MA004 and guide RNA GA346. A single 1 mg/kg dose (1:1 mRNA:gRNA weight ratio) was administered via intravenous infusion to 3 NHPs with two control NHP being administered a Dulbecco phosphate buffered saline on the same day. All the NHPs (dosed and control) were sacrificed on day 15 post infusion and tissue samples of the sacrificed NHPs were collected and analyzed for PCSK9 editing.

[0545] Percent adenine editing of the PCSK9 gene in each tissue sample was assessed using NGS and the average adenine editing percentage is set forth in the bar graph in FIG. 16. PCSK9 editing was predominately distributed to the liver.

### Example 7. ABE Variants

[0546] Exemplary modified ABE mRNA variants and sequences are described herein, including as specified in Tables 1 and 2. The on-target editing efficiency of the exemplary modified ABE variants in combination with guide RNAs targeting ANGPTL3 are shown in FIGS. 19 and 20A-20E. The editing of the off-target site candidates B2 and B6 of the exemplary modified ABE variants in combination with guide RNAs targeting ANGPTL3 are shown in FIGS. 26 and 27. The editing experiments were performed similarly as described in previous examples.

TABLE 1
Summary of sequence differences between MA040, MA041, MA045
MA064 MA065, MA066, and MA067

| | Amino acid | |
|---|---|---|
| | mutations | |
| | in SpCas9 | Codon differences in adenine base |
| | nickase | editor coding region vs MA004 |
| ID | region | (bolded and underlined) |
| MA040 | SpCas9 | SpCas9 nickase location: |
| | nickase | Codon 1135 is |
| | location: | changed from |
| | D1135E | GAC to GAG |
| | ABE8.8 | ABE8.8 location: |
| | location: | Codon 1333 is changed from |
| | D1333E | GAC to GAG |
| MA041 | SpCas9 | SpCas9 nickase location: |
| | nickase | Codon 691 is changed from |
| | location: | CGG to GCC |
| | R691A, | Codon 1135 is changed from |
| | D1135E | GAC to GAG |
| | ABE8.8 | ABE8.8 location: |
| | location: | Codon 889 is changed from CGG to GCC |
| | R889A, | Codon 1333 is changed from |
| | D1333E | GAC to GAG |
| MA045 | SpCas9 | SpCas9 nickase |
| | nickase | location: |
| | location: | Codon 691 is changed from |
| | R691A | CGG to GCC |
| | ABE8.8 | ABE8.8 location: |
| | location: | Codon 889 is changed from |
| | R889A | CGG to GCC |
| MA064 | SpCas9 | SpCas9 nickase location: |
| Hypa | nickase | Codon 692 is changed from |
| | location: | AAC to GCC |
| | N692A, | Codon 694 is changed from AUG to GCC |
| | M694A, | Codon 695 is changed from CAG to GCC |
| | Q695A, | Codon 698 is changed from |
| | H698A | CAC to GCC |
| | ABE8.8 | ABE8.8 location: |
| | location: | Codon 890 is changed from AAC to GCC |
| | N890A, | Codon 892 is changed from AUG to GCC |
| | M892A, | Codon 893 is changed from CAG to GCC |
| | Q893A, | Codon 896 is changed from |
| | H896A | CAC to GCC |
| MA065 | SpCas9 | SpCas9 nickase location: |
| | nickase | Codon 855 is changed from |
| | location: | AAG to GCC |
| | K855A | ABE8.8 location: |
| | ABE8.8 | Codon 1053 is |
| | location: | changed from |
| | K1053A | AAG to GCC |
| MA066 | SpCas9 | SpCas9 nickase location: |
| eSpCas9(1.1) | nickase | Codon 848 is changed from |
| | location: | AAG to GCC |
| | K848A, | Codon 1003 is changed from AAG to GCC |
| | K1003A, | Codon 1060 is changed from |
| | R1060A | CGG to GCC |
| | ABE8.8 | ABE8.8 location: |
| | location: | Codon 1046 is changed from AAG to GCC |
| | K1046A, | Codon 1201 is changed from AAG to GCC |
| | K1201A, | Codon 1258 is changed from |
| | K1258A | CGG to GCC |
| MA067 | SpCas9 | SpCas9 nickase location: |
| eSpCas9(1.0) | nickase | Codon 810 is changed from AAG to GCC |
| | location: | Codon 1003 is changed from |
| | K810A, | AAG to GCC |
| | K1003A, | Codon 1060 is changed from |
| | R1060A | CGG to GCC |
| | ABE8.8 | ABE8.8 location: |
| | location: | Codon 1008 is changed from AAG to GCC |
| | K1008A, | Codon 1201 is changed from AAG to GCC |
| | K1201A, | Codon 1258 is changed from |
| | K1258A | CGG to GCC |

TABLE 2
Sequences for high fidelity ABEs MA040, MA041, MA045, MA064 MA065,
MA066, and MA067
MA040 mRNA sequence:

| | | SEQ ID |
|---|---|---|
| Region | Sequence | NO |
| 5′ | AGGAAAu′AAGAGAGAAAAGAAGAGu′AAGAAGAAAu′Au′AA | 689 |
| UTR | GAGCCACC | |
| High | ATGAGCGAGGTGGAGTTCAGCCACGAGTACTGGATGCGGCAC | 717 |
| fidelity | GCCCTGACCCTGGCCAAGCGGGCCCGGGACGAGCGGGAGGT | |
| ABE | GCCCGTGGGCGCCGTGCTGGTGCTGAACAACCGGGTGATCGG | |
| CDS | CGAGGGCTGGAACCGGGCCATCGGCCTGCACGACCCCACCGC | |
| | CCACGCCGAGATCATGGCCCTGCGGCAGGGCGGCCTGGTGAT | |
| | GCAGAACTACCGGCTGATCGACGCCACCCTGTACGTGACCTT | |
| | CGAGCCCTGCGTGATGTGCGCCGGCGCCATGATCCACAGCCG | |
| | GATCGGCCGGGTGGTGTTCGGCGTGCGGAACGCCAAGACCGG | |
| | CGCCGCCGGCAGCCTGATGGACGTGCTGCACCACCCCGGCAT | |
| | GAACCACCGGGTGGAGATCACCGAGGGCATCCTGGCCGACG | |
| | AGTGCGCCGCCCTGCTGTGCCGGTTCTTCCGGATGCCCCGGCG | |
| | GGTGTTCAACGCCCAGAAGAAGGCCCAGAGCAGCACCGACA | |
| | GCGGCGGCAGCAGCGGCGGCAGCAGCGGCAGCGAGACACCC | |
| | GGCACCAGCGAGAGCGCCACCCCCGAGAGCAGCGGCGGCAG | |
| | CAGCGGCGGCAGCGACAAGAAGTACAGCATCGGCCTGGCCA | |
| | TCGGCACCAACAGCGTGGGCTGGGCCGTGATCACCGACGAGT | |
| | ACAAGGTGCCCAGCAAGAAGTTCAAGGTGCTGGGCAACACC | |
| | GACCGGCACAGCATCAAGAAGAACCTGATCGGCGCCCTGCTG | |
| | TTCGACAGCGGCGAGACAGCCGAGGCCACCCGGCTGAAGCG | |
| | GACCGCCCGGCGGCGGTACACCCGGCGGAAGAACCGGATCT | |
| | GCTACCTGCAGGAGATCTTCAGCAACGAGATGGCCAAGGTGG | |
| | ACGACAGCTTCTTCCACCGGCTGGAGGAGAGCTTCCTGGTGG | |
| | AGGAGGACAAGAAGCACGAGCGGCACCCCATCTTCGGCAAC | |
| | ATCGTGGACGAGGTGGCCTACCACGAGAAGTACCCCACCATC | |
| | TACCACCTGCGGAAGAAGCTGGTGGACAGCACCGACAAGGC | |
| | CGACCTGCGGCTGATCTACCTGGCCCTGGCCCACATGATCAA | |
| | GTTCCGGGGCCACTTCCTGATCGAGGGCGACCTGAACCCCGA | |
| | CAACAGCGACGTGGACAAGCTGTTCATCCAGCTGGTGCAGAC | |
| | CTACAACCAGCTGTTCGAGGAGAACCCCATCAACGCCAGCGG | |
| | CGTGGACGCCAAGGCCATCCTGAGCGCCCGGCTGAGCAAGAG | |
| | CCGGCGGCTGGAGAACCTGATCGCCCAGCTGCCCGGCGAGAA | |
| | GAAGAACGGCCTGTTCGGCAACCTGATCGCCCTGAGCCTGGG | |
| | CCTGACCCCCAACTTCAAGAGCAACTTCGACCTGGCCGAGGA | |
| | CGCCAAGCTGCAGCTGAGCAAGGACACCTACGACGACGACCT | |
| | GGACAACCTGCTGGCCCAGATCGGCGACCAGTACGCCGACCT | |
| | GTTCCTGGCCGCCAAGAACCTGAGCGACGCCATCCTGCTGAG | |
| | CGACATCCTGCGGGTGAACACCGAGATCACCAAGGCCCCCCT | |
| | GAGCGCCAGCATGATCAAGCGGTACGACGAGCACCACCAGG | |
| | ACCTGACCCTGCTGAAGGCCCTGGTGCGGCAGCAGCTGCCCG | |
| | AGAAGTACAAGGAGATCTTCTTCGACCAGAGCAAGAACGGCT | |
| | ACGCCGGCTACATCGACGGCGGCGCCAGCCAGGAGGAGTTCT | |
| | ACAAGTTCATCAAGCCCATCCTGGAGAAGATGGACGGCACCG | |
| | AGGAGCTGCTGGTGAAGCTGAACCGGGAGGACCTGCTGCGG | |
| | AAGCAGCGGACCTTCGACAACGGCAGCATCCCCCACCAGATC | |
| | CACCTGGGCGAGCTGCACGCCATCCTGCGGCGGCAGGAGGAC | |
| | TTCTACCCCTTCCTGAAGGACAACCGGGAGAAGATCGAGAAG | |
| | ATCCTGACCTTCCGGATCCCCTACTACGTGGGCCCCCTGGCCC | |
| | GGGGCAACAGCCGGTTCGCCTGGATGACCCGCAAGAGCGAG | |
| | GAGACAATCACCCCCTGGAACTTCGAGGAGGTGGTGGACAAG | |
| | GGCGCCAGCGCCCAGAGCTTCATCGAGCGGATGACCAACTTC | |
| | GACAAGAACCTGCCCAACGAGAAGGTGCTGCCCAAGCACAG | |
| | CCTGCTGTACGAGTACTTCACCGTGTACAACGAGCTGACCAA | |
| | GGTGAAGTACGTGACCGAGGGCATGCGGAAGCCCGCCTTCCT | |
| | GAGCGGCGAGCAGAAGAAGGCCATCGTGGACCTGCTGTTCAA | |
| | GACCAACCGGAAGGTGACCGTGAAGCAGCTGAAGGAGGACT | |
| | ACTTCAAGAAGATCGAGTGCTTCGACAGCGTGGAGATCAGCG | |
| | GCGTGGAGGACCGGTTCAACGCCAGCCTGGGCACCTACCACG | |
| | ACCTGCTGAAGATCATCAAGGACAAGGACTTCCTGGACAACG | |
| | AGGAGAACGAGGACATCCTGGAGGACATCGTGCTGACCCTGA | |
| | CCCTGTTCGAGGACCGGGAGATGATCGAGGAGCGGCTGAAG | |
| | ACCTACGCCCACCTGTTCGACGACAAGGTGATGAAGCAGCTG | |
| | AAGCGGCGGCGGTACACCGGCTGGGGCCGGCTGAGCCGGAA | |
| | GCTGATCAACGGCATCCGGGACAAGCAGAGCGGCAAGACCA | |
| | TCCTGGACTTCCTCAAGAGCGACGGCTTCGCCAACCGGAACT | |
| | TCATGCAGCTGATCCACGACGACAGCCTGACCTTCAAGGAGG | |
| | ACATCCAGAAGGCCCAGGTGAGCGGCCAGGGCGACAGCCTG | |
| | CACGAGCACATCGCCAACCTGGCCGGCAGCCCCGCCATCAAG | |
| | AAGGGCATCCTGCAGACCGTGAAGGTGGTGGACGAGCTGGTG | |
| | AAGGTGATGGGCCGGCACAAGCCCGAGAACATCGTGATCGA | |
| | GATGGCCCGGGAGAACCAGACCACCCAGAAGGGCCAGAAGA | |
| | ACAGCCGGGAGCGGATGAAGCGGATCGAGGAGGGCATCAAG | |
| | GAGCTGGGCAGCCAGATCCTGAAGGAGCACCCCGTGGAGAA | |
| | CACCCAGCTGCAGAACGAGAAGCTGTACCTGTACTACCTGCA | |
| | GAACGGCCGGGACATGTACGTGGACCAGGAGCTGGACATCA | |
| | ACCGGCTGAGCGACTACGACGTGGACCACATCGTGCCCCAGA | |
| | GCTTCCTGAAGGACGACAGCATCGACAACAAGGTGCTGACCC | |
| | GGAGCGACAAGAACCGGGGCAAGAGCGACAACGTGCCCAGC | |
| | GAGGAGGTGGTGAAGAAGATGAAGAACTACTGGCGGCAGCT | |
| | GCTGAACGCCAAGCTGATCACCCAGCGGAAGTTCGACAACCT | |
| | GACCAAGGCCGAGCGGGGCGGCCTGAGCGAGCTGGACAAGG | |
| | CCGGCTTCATCAAGCGGCAGCTGGTGGAGACACGGCAGATCA | |
| | CCAAGCACGTGGCCCAGATCCTGGACAGCCGGATGAACACCA | |
| | AGTACGACGAGAACGACAAGCTGATCCGGGAGGTGAAGGTG | |
| | ATCACCCTCAAGAGCAAGCTGGTGAGCGACTTCCGGAAGGAC | |
| | TTCCAGTTCTACAAGGTGCGGGAGATCAACAACTACCACCAC | |
| | GCCCACGACGCCTACCTGAACGCCGTGGTGGGCACCGCCCTG | |
| | ATCAAGAAGTACCCCAAGCTGGAGAGCGAGTTCGTGTACGGC | |
| | GACTACAAGGTGTACGACGTGCGGAAGATGATCGCCAAGAG | |
| | CGAGCAGGAGATCGGCAAGGCCACCGCCAAGTACTTCTTCTA | |
| | CAGCAACATCATGAACTTCTTCAAGACCGAGATCACCCTGGC | |
| | CAACGGCGAGATCCGGAAGCGGCCCCTGATCGAGACAAACG | |
| | GCGAGACAGGCGAGATCGTGTGGGACAAGGGCCGGGACTTC | |
| | GCCACCGTGCGGAAGGTGCTGAGCATGCCCCAGGTGAACATC | |
| | GTGAAGAAGACCGAGGTGCAGACCGGCGGCTTCAGCAAGGA | |
| | GAGCATCCTGCCCAAGCGGAACAGCGACAAGCTGATCGCCCG | |
| | GAAGAAGGACTGGGACCCCAAGAAGTACGGCGGCTTCGAGA | |
| | GCCCCACCGTGGCCTACAGCGTGCTGGTGGTGGCCAAGGTGG | |
| | AGAAGGGCAAGAGCAAGAAGCTCAAGAGCGTGAAGGAGCTG | |
| | CTGGGCATCACCATCATGGAGCGGAGCAGCTTCGAGAAGAAC | |
| | CCCATCGACTTCCTGGAGGCCAAGGGCTACAAGGAGGTGAAG | |
| | AAGGACCTGATCATCAAGCTGCCCAAGTACAGCCTGTTCGAG | |
| | CTGGAGAACGGCCGGAAGCGGATGCTGGCCAGCGCCGGCGA | |
| | GCTGCAGAAGGGCAACGAGCTGGCCCTGCCCAGCAAGTACGT | |
| | GAACTTCCTGTACCTGGCCAGCCACTACGAGAAGCTGAAGGG | |
| | CAGCCCCGAGGACAACGAGCAGAAGCAGCTGTTCGTGGAGC | |
| | AGCACAAGCACTACCTGGACGAGATCATCGAGCAGATCAGCG | |
| | AGTTCAGCAAGCGGGTGATCCTGGCCGACGCCAACCTGGACA | |
| | AGGTGCTGAGCGCCTACAACAAGCACCGGGACAAGCCCATCC | |
| | GGGAGCAGGCCGAGAACATCATCCACCTGTTCACCCTGACCA | |
| | ACCTGGGCGCCCCCGCCGCCTTCAAGTACTTCGACACCACCA | |
| | TCGACCGGAAGCGGTACACCAGCACCAAGGAGGTGCTGGAC | |
| | GCCACCCTGATCCACCAGAGCATCACCGGCCTGTACGAGACA | |
| | CGGATCGACCTGAGCCAGCTGGGCGGCGACGAGGGCGCCGA | |
| | CAAGCGGACCGCCGACGGCAGCGAGTTCGAGAGCCCCAAGA | |
| | AGAAGCGGAAGGTGTGA | |
| 3′ | GCGGCCGCu′u′AAu′u′AAGCu′GCCu′u′Cu′GCGGGGCu′u′GCCu′ | 700 |
| UTR | u′Cu′GGCCAu′GCCCu′u′Cu′u′Cu′Cu′CCCu′u′GCACCu′Gu′ACCu′ | |
| | Cu′u′GGu′Cu′u′u′GAAu′AAAGCCu′GAGu′AGGAAGu′Cu′AGA | |
| MA040 | MSEVEFSHEYWMRHALTLAKRARDEREVPVGAVLVLNNRVIGE | 718 |
| amino | GWNRAIGLHDPTAHAEIMALRQGGLVMQNYRLIDATLYVTFEP | |
| acid | CVMCAGAMIHSRIGRVVFGVRNAKTGAAGSLMDVLHHPGMNH | |
| sequence | RVEITEGILADECAALLCRFFRMPRRVFNAQKKAQSSTDSGGSSG | |
| | GSSGSETPGTSESATPESSGGSSGGSDKKYSIGLAIGTNSVGWAVI | |
| | TDEYKVPSKKFKVLGNTDRHSIKKNLIGALLFDSGETAEATRLK | |
| | RTARRRYTRRKNRICYLQEIFSNEMAKVDDSFFHRLEESFLVEED | |
| | KKHERHPIFGNIVDEVAYHEKYPTIYHLRKKLVDSTDKADLRLIY | |
| | LALAHMIKFRGHFLIEGDLNPDNSDVDKLFIQLVQTYNQLFEENP | |
| | INASGVDAKAILSARLSKSRRLENLIAQLPGEKKNGLFGNLIALSL | |
| | GLTPNFKSNFDLAEDAKLQLSKDTYDDDLDNLLAQIGDQYADL | |
| | FLAAKNLSDAILLSDILRVNTEITKAPLSASMIKRYDEHHQDLTL | |
| | LKALVRQQLPEKYKEIFFDQSKNGYAGYIDGGASQEEFYKFIKPI | |
| | LEKMDGTEELLVKLNREDLLRKQRTFDNGSIPHQIHLGELHAILR | |
| | RQEDFYPFLKDNREKIEKILTFRIPYYVGPLARGNSRFAWMTRKS | |
| | EETITPWNFEEVVDKGASAQSFIERMTNFDKNLPNEKVLPKHSLL | |
| | YEYFTVYNELTKVKYVTEGMRKPAFLSGEQKKAIVDLLFKTNR | |
| | KVTVKQLKEDYFKKIECFDSVEISGVEDRFNASLGTYHDLLKIIK | |
| | DKDFLDNEENEDILEDIVLTLTLFEDREMIEERLKTYAHLFDDKV | |
| | MKQLKRRRYTGWGRLSRKLINGIRDKQSGKTILDFLKSDGFANR | |
| | NFMQLIHDDSLTFKEDIQKAQVSGQGDSLHEHIANLAGSPAIKK | |
| | GILQTVKVVDELVKVMGRHKPENIVIEMARENQTTQKGQKNSR | |
| | ERMKRIEEGIKELGSQILKEHPVENTQLQNEKLYLYYLQNGRDM | |
| | YVDQELDINRLSDYDVDHIVPQSFLKDDSIDNKVLTRSDKNRGK | |
| | SDNVPSEEVVKKMKNYWRQLLNAKLITQRKFDNLTKAERGGLS | |
| | ELDKAGFIKRQLVETRQITKHVAQILDSRMNTKYDENDKLIREV | |
| | KVITLKSKLVSDFRKDFQFYKVREINNYHHAHDAYLNAVVGTA | |
| | LIKKYPKLESEFVYGDYKVYDVRKMIAKSEQEIGKATAKYFFYS | |
| | NIMNFFKTEITLANGEIRKRPLIETNGETGEIVWDKGRDFATVRK | |
| | VLSMPQVNIVKKTEVQTGGFSKESILPKRNSDKLIARKKDWDPK | |
| | KYGGFESPTVAYSVLVVAKVEKGKSKKLKSVKELLGITIMERSS | |
| | FEKNPIDFLEAKGYKEVKKDLIIKLPKYSLFELENGRKRMLASAG | |
| | ELQKGNELALPSKYVNFLYLASHYEKLKGSPEDNEQKQLFVEQ | |
| | HKHYLDEIIEQISEFSKRVILADANLDKVLSAYNKHRDKPIREQA | |
| | ENIIHLFTLTNLGAPAAFKYFDTTIDRKRYTSTKEVLDATLIHQSI | |
| | TGLYETRIDLSQLGGDEGADKRTADGSEFESPKKKRKV | |

MA041 mRNA sequence:

| Region | Sequence | |
|---|---|---|
| 5′ | AGGAAAu′AAGAGAGAAAAGAAGAGu′AAGAAGAAAu′Au′AA | 689 |
| UTR | GAGCCACC | |
| High | ATGAGCGAGGTGGAGTTCAGCCACGAGTACTGGATGCGGCAC | 719 |
| fidelity | GCCCTGACCCTGGCCAAGCGGGCCCGGGACGAGCGGGAGGT | |
| ABE | GCCCGTGGGCGCCGTGCTGGTGCTGAACAACCGGGTGATCGG | |
| CDS | CGAGGGCTGGAACCGGGCCATCGGCCTGCACGACCCCACCGC | |
| | CCACGCCGAGATCATGGCCCTGCGGCAGGGCGGCCTGGTGAT | |
| | GCAGAACTACCGGCTGATCGACGCCACCCTGTACGTGACCTT | |
| | CGAGCCCTGCGTGATGTGCGCCGGCGCCATGATCCACAGCCG | |
| | GATCGGCCGGGTGGTGTTCGGCGTGCGGAACGCCAAGACCGG | |
| | CGCCGCCGGCAGCCTGATGGACGTGCTGCACCACCCCGGCAT | |
| | GAACCACCGGGTGGAGATCACCGAGGGCATCCTGGCCGACG | |
| | AGTGCGCCGCCCTGCTGTGCCGGTTCTTCCGGATGCCCCGGCG | |
| | GGTGTTCAACGCCCAGAAGAAGGCCCAGAGCAGCACCGACA | |
| | GCGGCGGCAGCAGCGGCGGCAGCAGCGGCAGCGAGACACCC | |
| | GGCACCAGCGAGAGCGCCACCCCCGAGAGCAGCGGCGGCAG | |
| | CAGCGGCGGCAGCGACAAGAAGTACAGCATCGGCCTGGCCA | |
| | TCGGCACCAACAGCGTGGGCTGGGCCGTGATCACCGACGAGT | |
| | ACAAGGTGCCCAGCAAGAAGTTCAAGGTGCTGGGCAACACC | |
| | GACCGGCACAGCATCAAGAAGAACCTGATCGGCGCCCTGCTG | |
| | TTCGACAGCGGCGAGACAGCCGAGGCCACCCGGCTGAAGCG | |
| | GACCGCCCGGCGGCGGTACACCCGGCGGAAGAACCGGATCT | |
| | GCTACCTGCAGGAGATCTTCAGCAACGAGATGGCCAAGGTGG | |
| | ACGACAGCTTCTTCCACCGGCTGGAGGAGAGCTTCCTGGTGG | |
| | AGGAGGACAAGAAGCACGAGCGGCACCCCATCTTCGGCAAC | |
| | ATCGTGGACGAGGTGGCCTACCACGAGAAGTACCCCACCATC | |
| | TACCACCTGCGGAAGAAGCTGGTGGACAGCACCGACAAGGC | |
| | CGACCTGCGGCTGATCTACCTGGCCCTGGCCCACATGATCAA | |
| | GTTCCGGGGCCACTTCCTGATCGAGGGCGACCTGAACCCCGA | |
| | CAACAGCGACGTGGACAAGCTGTTCATCCAGCTGGTGCAGAC | |
| | CTACAACCAGCTGTTCGAGGAGAACCCCATCAACGCCAGCGG | |
| | CGTGGACGCCAAGGCCATCCTGAGCGCCCGGCTGAGCAAGAG | |
| | CCGGCGGCTGGAGAACCTGATCGCCCAGCTGCCCGGCGAGAA | |
| | GAAGAACGGCCTGTTCGGCAACCTGATCGCCCTGAGCCTGGG | |
| | CCTGACCCCCAACTTCAAGAGCAACTTCGACCTGGCCGAGGA | |
| | CGCCAAGCTGCAGCTGAGCAAGGACACCTACGACGACGACCT | |
| | GGACAACCTGCTGGCCCAGATCGGCGACCAGTACGCCGACCT | |
| | GTTCCTGGCCGCCAAGAACCTGAGCGACGCCATCCTGCTGAG | |
| | CGACATCCTGCGGGTGAACACCGAGATCACCAAGGCCCCCCT | |
| | GAGCGCCAGCATGATCAAGCGGTACGACGAGCACCACCAGG | |
| | ACCTGACCCTGCTGAAGGCCCTGGTGCGGCAGCAGCTGCCCG | |
| | AGAAGTACAAGGAGATCTTCTTCGACCAGAGCAAGAACGGCT | |
| | ACGCCGGCTACATCGACGGCGGCGCCAGCCAGGAGGAGTTCT | |
| | ACAAGTTCATCAAGCCCATCCTGGAGAAGATGGACGGCACCG | |
| | AGGAGCTGCTGGTGAAGCTGAACCGGGAGGACCTGCTGCGG | |
| | AAGCAGCGGACCTTCGACAACGGCAGCATCCCCCACCAGATC | |
| | CACCTGGGCGAGCTGCACGCCATCCTGCGGCGGCAGGAGGAC | |
| | TTCTACCCCTTCCTGAAGGACAACCGGGAGAAGATCGAGAAG | |
| | ATCCTGACCTTCCGGATCCCCTACTACGTGGGCCCCCTGGCCC | |
| | GGGGCAACAGCCGGTTCGCCTGGATGACCCGCAAGAGCGAG | |
| | GAGACAATCACCCCCTGGAACTTCGAGGAGGTGGTGGACAAG | |
| | GGCGCCAGCGCCCAGAGCTTCATCGAGCGGATGACCAACTTC | |
| | GACAAGAACCTGCCCAACGAGAAGGTGCTGCCCAAGCACAG | |
| | CCTGCTGTACGAGTACTTCACCGTGTACAACGAGCTGACCAA | |
| | GGTGAAGTACGTGACCGAGGGCATGCGGAAGCCCGCCTTCCT | |
| | GAGCGGCGAGCAGAAGAAGGCCATCGTGGACCTGCTGTTCAA | |
| | GACCAACCGGAAGGTGACCGTGAAGCAGCTGAAGGAGGACT | |
| | ACTTCAAGAAGATCGAGTGCTTCGACAGCGTGGAGATCAGCG | |
| | GCGTGGAGGACCGGTTCAACGCCAGCCTGGGCACCTACCACG | |
| | ACCTGCTGAAGATCATCAAGGACAAGGACTTCCTGGACAACG | |
| | AGGAGAACGAGGACATCCTGGAGGACATCGTGCTGACCCTGA | |
| | CCCTGTTCGAGGACCGGGAGATGATCGAGGAGCGGCTGAAG | |
| | ACCTACGCCCACCTGTTCGACGACAAGGTGATGAAGCAGCTG | |
| | AAGCGGCGGCGGTACACCGGCTGGGGCCGGCTGAGCCGGAA | |
| | GCTGATCAACGGCATCCGGGACAAGCAGAGCGGCAAGACCA | |
| | TCCTGGACTTCCTCAAGAGCGACGGCTTCGCCAACGCCAACT | |
| | TCATGCAGCTGATCCACGACGACAGCCTGACCTTCAAGGAGG | |
| | ACATCCAGAAGGCCCAGGTGAGCGGCCAGGGCGACAGCCTG | |
| | CACGAGCACATCGCCAACCTGGCCGGCAGCCCCGCCATCAAG | |
| | AAGGGCATCCTGCAGACCGTGAAGGTGGTGGACGAGCTGGTG | |
| | AAGGTGATGGGCCGGCACAAGCCCGAGAACATCGTGATCGA | |
| | GATGGCCCGGGAGAACCAGACCACCCAGAAGGGCCAGAAGA | |
| | ACAGCCGGGAGCGGATGAAGCGGATCGAGGAGGGCATCAAG | |
| | GAGCTGGGCAGCCAGATCCTGAAGGAGCACCCCGTGGAGAA | |
| | CACCCAGCTGCAGAACGAGAAGCTGTACCTGTACTACCTGCA | |
| | GAACGGCCGGGACATGTACGTGGACCAGGAGCTGGACATCA | |
| | ACCGGCTGAGCGACTACGACGTGGACCACATCGTGCCCCAGA | |
| | GCTTCCTGAAGGACGACAGCATCGACAACAAGGTGCTGACCC | |
| | GGAGCGACAAGAACCGGGGCAAGAGCGACAACGTGCCCAGC | |
| | GAGGAGGTGGTGAAGAAGATGAAGAACTACTGGCGGCAGCT | |
| | GCTGAACGCCAAGCTGATCACCCAGCGGAAGTTCGACAACCT | |
| | GACCAAGGCCGAGCGGGGGGCCTGAGCGAGCTGGACAAGG | |
| | CCGGCTTCATCAAGCGGCAGCTGGTGGAGACACGGCAGATCA | |
| | CCAAGCACGTGGCCCAGATCCTGGACAGCCGGATGAACACCA | |
| | AGTACGACGAGAACGACAAGCTGATCCGGGAGGTGAAGGTG | |
| | ATCACCCTCAAGAGCAAGCTGGTGAGCGACTTCCGGAAGGAC | |
| | TTCCAGTTCTACAAGGTGCGGGAGATCAACAACTACCACCAC | |
| | GCCCACGACGCCTACCTGAACGCCGTGGTGGGCACCGCCCTG | |
| | ATCAAGAAGTACCCCAAGCTGGAGAGCGAGTTCGTGTACGGC | |
| | GACTACAAGGTGTACGACGTGCGGAAGATGATCGCCAAGAG | |
| | CGAGCAGGAGATCGGCAAGGCCACCGCCAAGTACTTCTTCTA | |
| | CAGCAACATCATGAACTTCTTCAAGACCGAGATCACCCTGGC | |
| | CAACGGCGAGATCCGGAAGCGGCCCCTGATCGAGACAAACG | |
| | GCGAGACAGGCGAGATCGTGTGGGACAAGGGCCGGGACTTC | |
| | GCCACCGTGCGGAAGGTGCTGAGCATGCCCCAGGTGAACATC | |
| | GTGAAGAAGACCGAGGTGCAGACCGGCGGCTTCAGCAAGGA | |
| | GAGCATCCTGCCCAAGCGGAACAGCGACAAGCTGATCGCCCG | |
| | GAAGAAGGACTGGGACCCCAAGAAGTACGGCGGCTTCGAGA | |
| | GCCCCACCGTGGCCTACAGCGTGCTGGTGGTGGCCAAGGTGG | |
| | AGAAGGGCAAGAGCAAGAAGCTCAAGAGCGTGAAGGAGCTG | |
| | CTGGGCATCACCATCATGGAGCGGAGCAGCTTCGAGAAGAAC | |
| | CCCATCGACTTCCTGGAGGCCAAGGGCTACAAGGAGGTGAAG | |
| | AAGGACCTGATCATCAAGCTGCCCAAGTACAGCCTGTTCGAG | |
| | CTGGAGAACGGCCGGAAGCGGATGCTGGCCAGCGCCGGCGA | |
| | GCTGCAGAAGGGCAACGAGCTGGCCCTGCCCAGCAAGTACGT | |
| | GAACTTCCTGTACCTGGCCAGCCACTACGAGAAGCTGAAGGG | |
| | CAGCCCCGAGGACAACGAGCAGAAGCAGCTGTTCGTGGAGC | |
| | AGCACAAGCACTACCTGGACGAGATCATCGAGCAGATCAGCG | |
| | AGTTCAGCAAGCGGGTGATCCTGGCCGACGCCAACCTGGACA | |
| | AGGTGCTGAGCGCCTACAACAAGCACCGGGACAAGCCCATCC | |
| | GGGAGCAGGCCGAGAACATCATCCACCTGTTCACCCTGACCA | |
| | ACCTGGGCGCCCCCGCCGCCTTCAAGTACTTCGACACCACCA | |
| | TCGACCGGAAGCGGTACACCAGCACCAAGGAGGTGCTGGAC | |
| | GCCACCCTGATCCACCAGAGCATCACCGGCCTGTACGAGACA | |
| | CGGATCGACCTGAGCCAGCTGGGCGGCGACGAGGGCGCCGA | |
| | CAAGCGGACCGCCGACGGCAGCGAGTTCGAGAGCCCCAAGA | |
| | AGAAGCGGAAGGTGTGA | |
| 3′ | GCGGCCGCu′u′AAu′u′AAGCu′GCCu′u′Cu′GCGGGGCu′u′GCCu′ | 700 |
| UTR | u′Cu′GGCCAu′GCCCu′u′Cu′u′Cu′Cu′CCCu′u′GCACCu′Gu′ACCu′ | |
| | Cu′u′GGu′Cu′u′u′GAAu′AAAGCCu′GAGu′AGGAAGu′Cu′AGA | |
| MA041 | MSEVEFSHEYWMRHALTLAKRARDEREVPVGAVLVLNNRVIGE | 720 |
| amino | GWNRAIGLHDPTAHAEIMALRQGGLVMQNYRLIDATLYVTFEP | |
| acid | CVMCAGAMIHSRIGRVVFGVRNAKTGAAGSLMDVLHHPGMNH | |
| sequence | RVEITEGILADECAALLCRFFRMPRRVFNAQKKAQSSTDSGGSSG | |
| | GSSGSETPGTSESATPESSGGSSGGSDKKYSIGLAIGTNSVGWAVI | |
| | TDEYKVPSKKFKVLGNTDRHSIKKNLIGALLFDSGETAEATRLK | |
| | RTARRRYTRRKNRICYLQEIFSNEMAKVDDSFFHRLEESFLVEED | |
| | KKHERHPIFGNIVDEVAYHEKYPTIYHLRKKLVDSTDKADLRLIY | |
| | LALAHMIKFRGHFLIEGDLNPDNSDVDKLFIQLVQTYNQLFEENP | |
| | INASGVDAKAILSARLSKSRRLENLIAQLPGEKKNGLFGNLIALSL | |
| | GLTPNFKSNFDLAEDAKLQLSKDTYDDDLDNLLAQIGDQYADL | |
| | FLAAKNLSDAILLSDILRVNTEITKAPLSASMIKRYDEHHQDLTL | |
| | LKALVRQQLPEKYKEIFFDQSKNGYAGYIDGGASQEEFYKFIKPI | |
| | LEKMDGTEELLVKLNREDLLRKQRTFDNGSIPHQIHLGELHAILR | |
| | RQEDFYPFLKDNREKIEKILTFRIPYYVGPLARGNSRFAWMTRKS | |
| | EETITPWNFEEVVDKGASAQSFIERMTNFDKNLPNEKVLPKHSLL | |
| | YEYFTVYNELTKVKYVTEGMRKPAFLSGEQKKAIVDLLFKTNR | |
| | KVTVKQLKEDYFKKIECFDSVEISGVEDRFNASLGTYHDLLKIIK | |
| | DKDFLDNEENEDILEDIVLTLTLFEDREMIEERLKTYAHLFDDKV | |
| | MKQLKRRRYTGWGRLSRKLINGIRDKQSGKTILDFLKSDGFANA | |
| | NFMQLIHDDSLTFKEDIQKAQVSGQGDSLHEHIANLAGSPAIKK | |
| | GILQTVKVVDELVKVMGRHKPENIVIEMARENQTTQKGQKNSR | |
| | ERMKRIEEGIKELGSQILKEHPVENTQLQNEKLYLYYLQNGRDM | |
| | YVDQELDINRLSDYDVDHIVPQSFLKDDSIDNKVLTRSDKNRGK | |
| | SDNVPSEEVVKKMKNYWRQLLNAKLITQRKFDNLTKAERGGLS | |
| | ELDKAGFIKRQLVETRQITKHVAQILDSRMNTKYDENDKLIREV | |
| | KVITLKSKLVSDFRKDFQFYKVREINNYHHAHDAYLNAVVGTA | |
| | LIKKYPKLESEFVYGDYKVYDVRKMIAKSEQEIGKATAKYFFYS | |
| | NIMNFFKTEITLANGEIRKRPLIETNGETGEIVWDKGRDFATVRK | |
| | VLSMPQVNIVKKTEVQTGGFSKESILPKRNSDKLIARKKDWDPK | |
| | KYGGFESPTVAYSVLVVAKVEKGKSKKLKSVKELLGITIMERSS | |
| | FEKNPIDFLEAKGYKEVKKDLIIKLPKYSLFELENGRKRMLASAG | |
| | ELQKGNELALPSKYVNFLYLASHYEKLKGSPEDNEQKQLFVEQ | |
| | HKHYLDEIIEQISEFSKRVILADANLDKVLSAYNKHRDKPIREQA | |
| | ENIIHLFTLTNLGAPAAFKYFDTTIDRKRYTSTKEVLDATLIHQSI | |
| | TGLYETRIDLSQLGGDEGADKRTADGSEFESPKKKRKV | |

MA045 mRNA sequence:

| Region | Sequence | |
|---|---|---|
| 5′ | AGGAAAu′AAGAGAGAAAAGAAGAGu′AAGAAGAAAu′Au′AA | 689 |
| UTR | GAGCCACC | |
| High | ATGAGCGAGGTGGAGTTCAGCCACGAGTACTGGATGCGGCAC | 721 |
| fidelity | GCCCTGACCCTGGCCAAGCGGGCCCGGGACGAGCGGGAGGT | |
| ABE | GCCCGTGGGCGCCGTGCTGGTGCTGAACAACCGGGTGATCGG | |
| CDS | CGAGGGCTGGAACCGGGCCATCGGCCTGCACGACCCCACCGC | |
| | CCACGCCGAGATCATGGCCCTGCGGCAGGGCGGCCTGGTGAT | |
| | GCAGAACTACCGGCTGATCGACGCCACCCTGTACGTGACCTT | |
| | CGAGCCCTGCGTGATGTGCGCCGGCGCCATGATCCACAGCCG | |
| | GATCGGCCGGGTGGTGTTCGGCGTGCGGAACGCCAAGACCGG | |
| | CGCCGCCGGCAGCCTGATGGACGTGCTGCACCACCCCGGCAT | |
| | GAACCACCGGGTGGAGATCACCGAGGGCATCCTGGCCGACG | |
| | AGTGCGCCGCCCTGCTGTGCCGGTTCTTCCGGATGCCCCGGCG | |
| | GGTGTTCAACGCCCAGAAGAAGGCCCAGAGCAGCACCGACA | |
| | GCGGCGGCAGCAGCGGCGGCAGCAGCGGCAGCGAGACACCC | |
| | GGCACCAGCGAGAGCGCCACCCCCGAGAGCAGCGGCGGCAG | |
| | CAGCGGCGGCAGCGACAAGAAGTACAGCATCGGCCTGGCCA | |
| | TCGGCACCAACAGCGTGGGCTGGGCCGTGATCACCGACGAGT | |
| | ACAAGGTGCCCAGCAAGAAGTTCAAGGTGCTGGGCAACACC | |
| | GACCGGCACAGCATCAAGAAGAACCTGATCGGCGCCCTGCTG | |
| | TTCGACAGCGGCGAGACAGCCGAGGCCACCCGGCTGAAGCG | |
| | GACCGCCCGGCGGCGGTACACCCGGCGGAAGAACCGGATCT | |
| | GCTACCTGCAGGAGATCTTCAGCAACGAGATGGCCAAGGTGG | |
| | ACGACAGCTTCTTCCACCGGCTGGAGGAGAGCTTCCTGGTGG | |
| | AGGAGGACAAGAAGCACGAGCGGCACCCCATCTTCGGCAAC | |
| | ATCGTGGACGAGGTGGCCTACCACGAGAAGTACCCCACCATC | |
| | TACCACCTGCGGAAGAAGCTGGTGGACAGCACCGACAAGGC | |
| | CGACCTGCGGCTGATCTACCTGGCCCTGGCCCACATGATCAA | |
| | GTTCCGGGGCCACTTCCTGATCGAGGGCGACCTGAACCCCGA | |
| | CAACAGCGACGTGGACAAGCTGTTCATCCAGCTGGTGCAGAC | |
| | CTACAACCAGCTGTTCGAGGAGAACCCCATCAACGCCAGCGG | |
| | CGTGGACGCCAAGGCCATCCTGAGCGCCCGGCTGAGCAAGAG | |
| | CCGGCGGCTGGAGAACCTGATCGCCCAGCTGCCCGGCGAGAA | |
| | GAAGAACGGCCTGTTCGGCAACCTGATCGCCCTGAGCCTGGG | |
| | CCTGACCCCCAACTTCAAGAGCAACTTCGACCTGGCCGAGGA | |
| | CGCCAAGCTGCAGCTGAGCAAGGACACCTACGACGACGACCT | |
| | GGACAACCTGCTGGCCCAGATCGGCGACCAGTACGCCGACCT | |
| | GTTCCTGGCCGCCAAGAACCTGAGCGACGCCATCCTGCTGAG | |
| | CGACATCCTGCGGGTGAACACCGAGATCACCAAGGCCCCCCT | |
| | GAGCGCCAGCATGATCAAGCGGTACGACGAGCACCACCAGG | |
| | ACCTGACCCTGCTGAAGGCCCTGGTGCGGCAGCAGCTGCCCG | |
| | AGAAGTACAAGGAGATCTTCTTCGACCAGAGCAAGAACGGCT | |
| | ACGCCGGCTACATCGACGGCGGCGCCAGCCAGGAGGAGTTCT | |
| | ACAAGTTCATCAAGCCCATCCTGGAGAAGATGGACGGCACCG | |
| | AGGAGCTGCTGGTGAAGCTGAACCGGGAGGACCTGCTGCGG | |
| | AAGCAGCGGACCTTCGACAACGGCAGCATCCCCCACCAGATC | |
| | CACCTGGGCGAGCTGCACGCCATCCTGCGGCGGCAGGAGGAC | |
| | TTCTACCCCTTCCTGAAGGACAACCGGGAGAAGATCGAGAAG | |
| | ATCCTGACCTTCCGGATCCCCTACTACGTGGGCCCCCTGGCCC | |
| | GGGGCAACAGCCGGTTCGCCTGGATGACCCGCAAGAGCGAG | |
| | GAGACAATCACCCCCTGGAACTTCGAGGAGGTGGTGGACAAG | |
| | GGCGCCAGCGCCCAGAGCTTCATCGAGCGGATGACCAACTTC | |
| | GACAAGAACCTGCCCAACGAGAAGGTGCTGCCCAAGCACAG | |
| | CCTGCTGTACGAGTACTTCACCGTGTACAACGAGCTGACCAA | |
| | GGTGAAGTACGTGACCGAGGGCATGCGGAAGCCCGCCTTCCT | |
| | GAGCGGCGAGCAGAAGAAGGCCATCGTGGACCTGCTGTTCAA | |
| | GACCAACCGGAAGGTGACCGTGAAGCAGCTGAAGGAGGACT | |
| | ACTTCAAGAAGATCGAGTGCTTCGACAGCGTGGAGATCAGCG | |
| | GCGTGGAGGACCGGTTCAACGCCAGCCTGGGCACCTACCACG | |
| | ACCTGCTGAAGATCATCAAGGACAAGGACTTCCTGGACAACG | |
| | AGGAGAACGAGGACATCCTGGAGGACATCGTGCTGACCCTGA | |
| | CCCTGTTCGAGGACCGGGAGATGATCGAGGAGCGGCTGAAG | |
| | ACCTACGCCCACCTGTTCGACGACAAGGTGATGAAGCAGCTG | |
| | AAGCGGCGGCGGTACACCGGCTGGGGCCGGCTGAGCCGGAA | |
| | GCTGATCAACGGCATCCGGGACAAGCAGAGCGGCAAGACCA | |
| | TCCTGGACTTCCTCAAGAGCGACGGCTTCGCCAACGCCAACT | |
| | TCATGCAGCTGATCCACGACGACAGCCTGACCTTCAAGGAGG | |
| | ACATCCAGAAGGCCCAGGTGAGCGGCCAGGGCGACAGCCTG | |
| | CACGAGCACATCGCCAACCTGGCCGGCAGCCCCGCCATCAAG | |
| | AAGGGCATCCTGCAGACCGTGAAGGTGGTGGACGAGCTGGTG | |
| | AAGGTGATGGGCCGGCACAAGCCCGAGAACATCGTGATCGA | |
| | GATGGCCCGGGAGAACCAGACCACCCAGAAGGGCCAGAAGA | |
| | ACAGCCGGGAGCGGATGAAGCGGATCGAGGAGGGCATCAAG | |
| | GAGCTGGGCAGCCAGATCCTGAAGGAGCACCCCGTGGAGAA | |
| | CACCCAGCTGCAGAACGAGAAGCTGTACCTGTACTACCTGCA | |
| | GAACGGCCGGGACATGTACGTGGACCAGGAGCTGGACATCA | |
| | ACCGGCTGAGCGACTACGACGTGGACCACATCGTGCCCCAGA | |
| | GCTTCCTGAAGGACGACAGCATCGACAACAAGGTGCTGACCC | |
| | GGAGCGACAAGAACCGGGGCAAGAGCGACAACGTGCCCAGC | |
| | GAGGAGGTGGTGAAGAAGATGAAGAACTACTGGCGGCAGCT | |
| | GCTGAACGCCAAGCTGATCACCCAGCGGAAGTTCGACAACCT | |
| | GACCAAGGCCGAGCGGGGCGGCCTGAGCGAGCTGGACAAGG | |
| | CCGGCTTCATCAAGCGGCAGCTGGTGGAGACACGGCAGATCA | |
| | CCAAGCACGTGGCCCAGATCCTGGACAGCCGGATGAACACCA | |
| | AGTACGACGAGAACGACAAGCTGATCCGGGAGGTGAAGGTG | |
| | ATCACCCTCAAGAGCAAGCTGGTGAGCGACTTCCGGAAGGAC | |
| | TTCCAGTTCTACAAGGTGCGGGAGATCAACAACTACCACCAC | |
| | GCCCACGACGCCTACCTGAACGCCGTGGTGGGCACCGCCCTG | |
| | ATCAAGAAGTACCCCAAGCTGGAGAGCGAGTTCGTGTACGGC | |
| | GACTACAAGGTGTACGACGTGCGGAAGATGATCGCCAAGAG | |
| | CGAGCAGGAGATCGGCAAGGCCACCGCCAAGTACTTCTTCTA | |
| | CAGCAACATCATGAACTTCTTCAAGACCGAGATCACCCTGGC | |
| | CAACGGCGAGATCCGGAAGCGGCCCCTGATCGAGACAAACG | |
| | GCGAGACAGGCGAGATCGTGTGGGACAAGGGCCGGGACTTC | |
| | GCCACCGTGCGGAAGGTGCTGAGCATGCCCCAGGTGAACATC | |
| | GTGAAGAAGACCGAGGTGCAGACCGGCGGCTTCAGCAAGGA | |
| | GAGCATCCTGCCCAAGCGGAACAGCGACAAGCTGATCGCCCG | |
| | GAAGAAGGACTGGGACCCCAAGAAGTACGGCGGCTTCGACA | |
| | GCCCCACCGTGGCCTACAGCGTGCTGGTGGTGGCCAAGGTGG | |
| | AGAAGGGCAAGAGCAAGAAGCTCAAGAGCGTGAAGGAGCTG | |
| | CTGGGCATCACCATCATGGAGCGGAGCAGCTTCGAGAAGAAC | |
| | CCCATCGACTTCCTGGAGGCCAAGGGCTACAAGGAGGTGAAG | |
| | AAGGACCTGATCATCAAGCTGCCCAAGTACAGCCTGTTCGAG | |
| | CTGGAGAACGGCCGGAAGCGGATGCTGGCCAGCGCCGGCGA | |
| | GCTGCAGAAGGGCAACGAGCTGGCCCTGCCCAGCAAGTACGT | |
| | GAACTTCCTGTACCTGGCCAGCCACTACGAGAAGCTGAAGGG | |
| | CAGCCCCGAGGACAACGAGCAGAAGCAGCTGTTCGTGGAGC | |
| | AGCACAAGCACTACCTGGACGAGATCATCGAGCAGATCAGCG | |
| | AGTTCAGCAAGCGGGTGATCCTGGCCGACGCCAACCTGGACA | |
| | AGGTGCTGAGCGCCTACAACAAGCACCGGGACAAGCCCATCC | |
| | GGGAGCAGGCCGAGAACATCATCCACCTGTTCACCCTGACCA | |
| | ACCTGGGCGCCCCCGCCGCCTTCAAGTACTTCGACACCACCA | |
| | TCGACCGGAAGCGGTACACCAGCACCAAGGAGGTGCTGGAC | |
| | GCCACCCTGATCCACCAGAGCATCACCGGCCTGTACGAGACA | |
| | CGGATCGACCTGAGCCAGCTGGGCGGCGACGAGGGCGCCGA | |
| | CAAGCGGACCGCCGACGGCAGCGAGTTCGAGAGCCCCAAGA | |
| | AGAAGCGGAAGGTGTGA | |
| 3′ | GCGGCCGCu′u′AAu′u′AAGCu′GCCu′u′Cu′GCGGGGCu′u′GCCu′ | 700 |
| UTR | u′Cu′GGCCAu′GCCCu′u′Cu′u′Cu′Cu′CCCu′u′GCACCu′Gu′ACCu′ | |
| | Cu′u′GGu′Cu′u′u′GAAu′AAAGCCu′GAGu′AGGAAGu′Cu′AGA | |
| MA045 | MSEVEFSHEYWMRHALTLAKRARDEREVPVGAVLVLNNRVIGE | 722 |
| amino | GWNRAIGLHDPTAHAEIMALRQGGLVMQNYRLIDATLYVTFEP | |
| acid | CVMCAGAMIHSRIGRVVFGVRNAKTGAAGSLMDVLHHPGMNH | |
| sequence | RVEITEGILADECAALLCRFFRMPRRVFNAQKKAQSSTDSGGSSG | |
| | GSSGSETPGTSESATPESSGGSSGGSDKKYSIGLAIGTNSVGWAVI | |
| | TDEYKVPSKKFKVLGNTDRHSIKKNLIGALLFDSGETAEATRLK | |
| | RTARRRYTRRKNRICYLQEIFSNEMAKVDDSFFHRLEESFLVEED | |
| | KKHERHPIFGNIVDEVAYHEKYPTIYHLRKKLVDSTDKADLRLIY | |
| | LALAHMIKFRGHFLIEGDLNPDNSDVDKLFIQLVQTYNQLFEENP | |
| | INASGVDAKAILSARLSKSRRLENLIAQLPGEKKNGLFGNLIALSL | |
| | GLTPNFKSNFDLAEDAKLQLSKDTYDDDLDNLLAQIGDQYADL | |
| | FLAAKNLSDAILLSDILRVNTEITKAPLSASMIKRYDEHHQDLTL | |
| | LKALVRQQLPEKYKEIFFDQSKNGYAGYIDGGASQEEFYKFIKPI | |
| | LEKMDGTEELLVKLNREDLLRKQRTFDNGSIPHQIHLGELHAILR | |
| | RQEDFYPFLKDNREKIEKILTFRIPYYVGPLARGNSRFAWMTRKS | |
| | EETITPWNFEEVVDKGASAQSFIERMTNFDKNLPNEKVLPKHSLL | |
| | YEYFTVYNELTKVKYVTEGMRKPAFLSGEQKKAIVDLLFKTNR | |
| | KVTVKQLKEDYFKKIECFDSVEISGVEDRFNASLGTYHDLLKIIK | |
| | DKDFLDNEENEDILEDIVLTLTLFEDREMIEERLKTYAHLFDDKV | |
| | MKQLKRRRYTGWGRLSRKLINGIRDKQSGKTILDFLKSDGFANA | |
| | NFMQLIHDDSLTFKEDIQKAQVSGQGDSLHEHIANLAGSPAIKK | |
| | GILQTVKVVDELVKVMGRHKPENIVIEMARENQTTQKGQKNSR | |
| | ERMKRIEEGIKELGSQILKEHPVENTQLQNEKLYLYYLQNGRDM | |
| | YVDQELDINRLSDYDVDHIVPQSFLKDDSIDNKVLTRSDKNRGK | |
| | SDNVPSEEVVKKMKNYWRQLLNAKLITQRKFDNLTKAERGGLS | |
| | ELDKAGFIKRQLVETRQITKHVAQILDSRMNTKYDENDKLIREV | |
| | KVITLKSKLVSDFRKDFQFYKVREINNYHHAHDAYLNAVVGTA | |
| | LIKKYPKLESEFVYGDYKVYDVRKMIAKSEQEIGKATAKYFFYS | |
| | NIMNFFKTEITLANGEIRKRPLIETNGETGEIVWDKGRDFATVRK | |
| | VLSMPQVNIVKKTEVQTGGFSKESILPKRNSDKLIARKKDWDPK | |
| | KYGGFDSPTVAYSVLVVAKVEKGKSKKLKSVKELLGITIMERSS | |
| | FEKNPIDFLEAKGYKEVKKDLIIKLPKYSLFELENGRKRMLASAG | |
| | ELQKGNELALPSKYVNFLYLASHYEKLKGSPEDNEQKQLFVEQ | |
| | HKHYLDEIIEQISEFSKRVILADANLDKVLSAYNKHRDKPIREQA | |
| | ENIIHLFTLTNLGAPAAFKYFDTTIDRKRYTSTKEVLDATLIHQSI | |
| | TGLYETRIDLSQLGGDEGADKRTADGSEFESPKKKRKV | |

MA064 (Hypa) mRNA sequence:

| Region | Sequence | |
|---|---|---|
| 5′ | AGGAAAu′AAGAGAGAAAAGAAGAGu′AAGAAGAAAu′Au′AA | 689 |
| UTR | GAGCCACC | |
| High | Au′GAGCGAGGu′GGAGu′u′CAGCCACGAGu′ACu′GGAu′GCGG | 723 |
| fidelity | CACGCCCu′GACCCu′GGCCAAGCGGGCCCGGGACGAGCGGGA | |
| ABE | GGu′GCCCGu′GGGCGCCGu′GCu′GGu′GCu′GAACAACCGGGu′G | |
| CDS | Au′CGGCGAGGGCu′GGAACCGGGCCAu′CGGCCu′GCACGACC | |
| | CCACCGCCCACGCCGAGAu′CAu′GGCCCu′GCGGCAGGGCGGC | |
| | Cu′GGu′GAu′GCAGAACu′ACCGGCu′GAu′CGACGCCACCCu′Gu′ | |
| | ACGu′GACCu′u′CGAGCCCu′GCGu′GAu′Gu′GCGCCGGCGCCAu′ | |
| | GAu′CCACAGCCGGAu′CGGCCGGGu′GGu′Gu′u′CGGCGu′GCGG | |
| | AACGCCAAGACCGGCGCCGCCGGCAGCCu′GAu′GGACGu′GCu | |
| | ′GCACCACCCCGGCAu′GAACCACCGGGu′GGAGAu′CACCGAG | |
| | GGCAu′CCu′GGCCGACGAGu′GCGCCGCCCu′GCu′Gu′GCCGGu′ | |
| | u′Cu′u′CCGGAu′GCCCCGGCGGGu′Gu′u′CAACGCCCAGAAGAA | |
| | GGCCCAGAGCAGCACCGACAGCGGCGGCAGCAGCGGCGGCA | |
| | GCAGCGGCAGCGAGACACCCGGCACCAGCGAGAGCGCCACC | |
| | CCCGAGAGCAGCGGCGGCAGCAGCGGCGGCAGCGACAAGAA | |
| | Gu′ACAGCAu′CGGCCu′GGCCAu′CGGCACCAACAGCGu′GGGC | |
| | u′GGGCCGu′GAu′CACCGACGAGu′ACAAGGu′GCCCAGCAAGA | |
| | AGu′u′CAAGGu′GCu′GGGCAACACCGACCGGCACAGCAu′CAA | |
| | GAAGAACCu′GAu′CGGCGCCCu′GCu′Gu′u′CGACAGCGGCGAG | |
| | ACAGCCGAGGCCACCCGGCu′GAAGCGGACCGCCCGGCGGCG | |
| | Gu′ACACCCGGCGGAAGAACCGGAu′Cu′GCu′ACCu′GCAGGAG | |
| | Au′Cu′u′CAGCAACGAGAu′GGCCAAGGu′GGACGACAGCu′u′Cu | |
| | ′u′CCACCGGCu′GGAGGAGAGCu′u′CCu′GGu′GGAGGAGGACA | |
| | AGAAGCACGAGCGGCACCCCAu′Cu′u′CGGCAACAu′CGu′GGA | |
| | CGAGGu′GGCCu′ACCACGAGAAGu′ACCCCACCAu′Cu′ACCAC | |
| | Cu′GCGGAAGAAGCu′GGu′GGACAGCACCGACAAGGCCGACCU | |
| | ′GCGGCu′GAu′Cu′ACCu′GGCCCu′GGCCCACAu′GAu′CAAGu′u′ | |
| | CCGGGGCCACu′u′CCu′GAu′CGAGGGCGACCu′GAACCCCGAC | |
| | AACAGCGACGu′GGACAAGCu′Gu′u′CAu′CCAGCu′GGu′GCAGA | |
| | CCu′ACAACCAGCu′Gu′u′CGAGGAGAACCCCAu′CAACGCCAG | |
| | CGGCGu′GGACGCCAAGGCCAu′CCu′GAGCGCCCGGCu′GAGC | |
| | AAGAGCCGGCGGCu′GGAGAACCu′GAu′CGCCCAGCu′GCCCG | |
| | GCGAGAAGAAGAACGGCCu′Gu′u′CGGCAACCu′GAu′CGCCCu′ | |
| | GAGCCu′GGGCCu′GACCCCCAACu′u′CAAGAGCAACu′u′CGAC | |
| | Cu′GGCCGAGGACGCCAAGCu′GCAGCu′GAGCAAGGACACCu′ | |
| | ACGACGACGACCu′GGACAACCu′GCu′GGCCCAGAu′CGGCGA | |
| | CCAGu′ACGCCGACCu′Gu′u′CCu′GGCCGCCAAGAACCu′GAGC | |
| | GACGCCAu′CCu′GCu′GAGCGACAu′CCu′GCGGGu′GAACACCG | |
| | AGAu′CACCAAGGCCCCCCu′GAGCGCCAGCAu′GAu′CAAGCG | |
| | Gu′ACGACGAGCACCACCAGGACCu′GACCCu′GCu′GAAGGCC | |
| | Cu′GGu′GCGGCAGCAGCu′GCCCGAGAAGu′ACAAGGAGAu′Cu′ | |
| | u′Cu′u′CGACCAGAGCAAGAACGGCu′ACGCCGGCu′ACAu′CGA | |
| | CGGCGGCGCCAGCCAGGAGGAGu′u′Cu′ACAAGu′u′CAu′CAAG | |
| | CCCAu′CCu′GGAGAAGAu′GGACGGCACCGAGGAGCu′GCu′GG | |
| | u′GAAGCu′GAACCGGGAGGACCu′GCu′GCGGAAGCAGCGGAC | |
| | Cu′u′CGACAACGGCAGCAu′CCCCCACCAGAu′CCACCu′GGGC | |
| | GAGCu′GCACGCCAu′CCu′GCGGCGGCAGGAGGACu′u′Cu′ACC | |
| | CCu′u′CCu′GAAGGACAACCGGGAGAAGAu′CGAGAAGAu′CCu′ | |
| | GACCu′u′CCGGAu′CCCCu′ACu′ACGu′GGGCCCCCu′GGCCCGG | |
| | GGCAACAGCCGGu′u′CGCCu′GGAu′GACCCGCAAGAGCGAGG | |
| | AGACAAu′CACCCCCu′GGAACu′u′CGAGGAGGu′GGu′GGACAA | |
| | GGGCGCCAGCGCCCAGAGCu′u′CAu′CGAGCGGAu′GACCAACu | |
| | ′u′CGACAAGAACCu′GCCCAACGAGAAGGu′GCu′GCCCAAGCA | |
| | CAGCCu′GCu′Gu′ACGAGu′ACu′u′CACCGu′Gu′ACAACGAGCu′ | |
| | GACCAAGGu′GAAGu′ACGu′GACCGAGGGCAu′GCGGAAGCCC | |
| | GCCu′u′CCu′GAGCGGCGAGCAGAAGAAGGCCAu′CGu′GGACC | |
| | u′GCu′Gu′u′CAAGACCAACCGGAAGGu′GACCGu′GAAGCAGCu′ | |
| | GAAGGAGGACu′ACu′u′CAAGAAGAu′CGAGu′GCu′u′CGACAG | |
| | CGu′GGAGAu′CAGCGGCGu′GGAGGACCGGu′u′CAACGCCAGC | |
| | Cu′GGGCACCu′ACCACGACCu′GCu′GAAGAu′CAu′CAAGGACA | |
| | AGGACu′u′CCu′GGACAACGAGGAGAACGAGGACAu′CCu′GGA | |
| | GGACAu′CGu′GCu′GACCCu′GACCCu′Gu′u′CGAGGACCGGGAG | |
| | Au′GAu′CGAGGAGCGGCu′GAAGACCu′ACGCCCACCu′Gu′u′CG | |
| | ACGACAAGGu′GAu′GAAGCAGCu′GAAGCGGCGGCGGu′ACAC | |
| | CGGCu′GGGGCCGGCu′GAGCCGGAAGCu′GAu′CAACGGCAu′C | |
| | CGGGACAAGCAGAGCGGCAAGACCAu′CCu′GGACu′u′CCu′CA | |
| | AGAGCGACGGCu′u′CGCCAACCGGGCCu′u′CGCCGCCCu′GAu | |
| | ′CGCCGACGACAGCCu′GACCu′u′CAAGGAGGACAu′CCAGAAG | |
| | GCCCAGGu′GAGCGGCCAGGGCGACAGCCu′GCACGAGCACAu | |
| | ′CGCCAACCu′GGCCGGCAGCCCCGCCAu′CAAGAAGGGCAu′C | |
| | Cu′GCAGACCGu′GAAGGu′GGu′GGACGAGCu′GGu′GAAGGu′G | |
| | Au′GGGCCGGCACAAGCCCGAGAACAu′CGu′GAu′CGAGAu′GG | |
| | CCCGGGAGAACCAGACCACCCAGAAGGGCCAGAAGAACAGC | |
| | CGGGAGCGGAu′GAAGCGGAu′CGAGGAGGGCAu′CAAGGAGC | |
| | u′GGGCAGCCAGAu′CCu′GAAGGAGCACCCCGu′GGAGAACAC | |
| | CCAGCu′GCAGAACGAGAAGCu′Gu′ACCu′Gu′ACu′ACCu′GCAG | |
| | AACGGCCGGGACAu′Gu′ACGu′GGACCAGGAGCu′GGACAu′CA | |
| | ACCGGCu′GAGCGACu′ACGACGu′GGACCACAu′CGu′GCCCCA | |
| | GAGCu′u′CCu′GAAGGACGACAGCAu′CGACAACAAGGu′GCu′G | |
| | ACCCGGAGCGACAAGAACCGGGGCAAGAGCGACAACGu′GCC | |
| | CAGCGAGGAGGu′GGu′GAAGAAGAu′GAAGAACu′ACu′GGCG | |
| | GCAGCu′GCu′GAACGCCAAGCu′GAu′CACCCAGCGGAAGu′u′C | |
| | GACAACCu′GACCAAGGCCGAGCGGGGCGGCCu′GAGCGAGCu | |
| | ′GGACAAGGCCGGCu′u′CAu′CAAGCGGCAGCu′GGu′GGAGAC | |
| | ACGGCAGAu′CACCAAGCACGu′GGCCCAGAu′CCu′GGACAGC | |
| | CGGAu′GAACACCAAGu′ACGACGAGAACGACAAGCu′GAu′CC | |
| | GGGAGGu′GAAGGu′GAu′CACCCu′CAAGAGCAAGCu′GGu′GA | |
| | GCGACu′u′CCGGAAGGACu′u′CCAGu′u′Cu′ACAAGGu′GCGGG | |
| | AGAu′CAACAACu′ACCACCACGCCCACGACGCCu′ACCu′GAAC | |
| | GCCGu′GGu′GGGCACCGCCCu′GAu′CAAGAAGu′ACCCCAAGC | |
| | u′GGAGAGCGAGu′u′CGu′Gu′ACGGCGACu′ACAAGGu′Gu′ACG | |
| | ACGu′GCGGAAGAu′GAu′CGCCAAGAGCGAGCAGGAGAu′CGG | |
| | CAAGGCCACCGCCAAGu′ACu′u′Cu′u′Cu′ACAGCAACAu′CAu′G | |
| | AACu′u′Cu′u′CAAGACCGAGAu′CACCCu′GGCCAACGGCGAGA | |
| | u′CCGGAAGCGGCCCCu′GAu′CGAGACAAACGGCGAGACAGG | |
| | CGAGAu′CGu′Gu′GGGACAAGGGCCGGGACu′u′CGCCACCGu′G | |
| | CGGAAGGu′GCu′GAGCAu′GCCCCAGGu′GAACAu′CGu′GAAGA | |
| | AGACCGAGGu′GCAGACCGGCGGCu′u′CAGCAAGGAGAGCAu′ | |
| | CCu′GCCCAAGCGGAACAGCGACAAGCu′GAu′CGCCCGGAAG | |
| | AAGGACu′GGGACCCCAAGAAGu′ACGGCGGCu′u′CGACAGCC | |
| | CCACCGu′GGCCu′ACAGCGu′GCu′GGu′GGu′GGCCAAGGu′GGA | |
| | GAAGGGCAAGAGCAAGAAGCu′CAAGAGCGu′GAAGGAGCu′G | |
| | Cu′GGGCAu′CACCAu′CAu′GGAGCGGAGCAGCu′u′CGAGAAGA | |
| | ACCCCAu′CGACu′u′CCu′GGAGGCCAAGGGCu′ACAAGGAGGu′ | |
| | GAAGAAGGACCu′GAu′CAu′CAAGCu′GCCCAAGu′ACAGCCu′G | |
| | u′u′CGAGCu′GGAGAACGGCCGGAAGCGGAu′GCu′GGCCAGCG | |
| | CCGGCGAGCu′GCAGAAGGGCAACGAGCu′GGCCCu′GCCCAGC | |
| | AAGu′ACGu′GAACu′u′CCu′Gu′ACCu′GGCCAGCCACu′ACGAGA | |
| | AGCu′GAAGGGCAGCCCCGAGGACAACGAGCAGAAGCAGCu′ | |
| | Gu′u′CGu′GGAGCAGCACAAGCACu′ACCu′GGACGAGAu′CAu′C | |
| | GAGCAGAu′CAGCGAGu′u′CAGCAAGCGGGu′GAu′CCu′GGCCG | |
| | ACGCCAACCu′GGACAAGGu′GCu′GAGCGCCu′ACAACAAGCA | |
| | CCGGGACAAGCCCAu′CCGGGAGCAGGCCGAGAACAu′CAu′CC | |
| | ACCu′Gu′u′CACCCu′GACCAACCu′GGGCGCCCCCGCCGCCu′u′ | |
| | CAAGu′ACu′u′CGACACCACCAu′CGACCGGAAGCGGu′ACACC | |
| | AGCACCAAGGAGGu′GCu′GGACGCCACCCu′GAu′CCACCAGA | |
| | GCAu′CACCGGCCu′Gu′ACGAGACACGGAu′CGACCu′GAGCCA | |
| | GCu′GGGCGGCGACGAGGGCGCCGACAAGCGGACCGCCGACG | |
| | GCAGCGAGu′u′CGAGAGCCCCAAGAAGAAGCGGAAGGu′Gu′G | |
| | A | |
| 3′ | GCGGCCGCu′u′AAu′u′AAGCu′GCCu′u′Cu′GCGGGGCu′u′GCCu′ | 700 |
| UTR | u′Cu′GGCCAu′GCCCu′u′Cu′u′Cu′Cu′CCCu′u′GCACCu′Gu′ACCu′ | |
| | Cu′u′GGu′Cu′u′u′GAAu′AAAGCCu′GAGu′AGGAAGu′Cu′AGA | |
| MA064 | MSEVEFSHEYWMRHALTLAKRARDEREVPVGAVLVLNNRVIGE | 724 |
| amino | GWNRAIGLHDPTAHAEIMALRQGGLVMQNYRLIDATLYVTFEP | |
| acid | CVMCAGAMIHSRIGRVVFGVRNAKTGAAGSLMDVLHHPGMNH | |
| sequence | RVEITEGILADECAALLCRFFRMPRRVFNAQKKAQSSTDSGGSSG | |
| | GSSGSETPGTSESATPESSGGSSGGSDKKYSIGLAIGTNSVGWAVI | |
| | TDEYKVPSKKFKVLGNTDRHSIKKNLIGALLFDSGETAEATRLK | |
| | RTARRRYTRRKNRICYLQEIFSNEMAKVDDSFFHRLEESFLVEED | |
| | KKHERHPIFGNIVDEVAYHEKYPTIYHLRKKLVDSTDKADLRLIY | |
| | LALAHMIKFRGHFLIEGDLNPDNSDVDKLFIQLVQTYNQLFEENP | |
| | INASGVDAKAILSARLSKSRRLENLIAQLPGEKKNGLFGNLIALSL | |
| | GLTPNFKSNFDLAEDAKLQLSKDTYDDDLDNLLAQIGDQYADL | |
| | FLAAKNLSDAILLSDILRVNTEITKAPLSASMIKRYDEHHQDLTL | |
| | LKALVRQQLPEKYKEIFFDQSKNGYAGYIDGGASQEEFYKFIKPI | |
| | LEKMDGTEELLVKLNREDLLRKQRTFDNGSIPHQIHLGELHAILR | |
| | RQEDFYPFLKDNREKIEKILTFRIPYYVGPLARGNSRFAWMTRKS | |
| | EETITPWNFEEVVDKGASAQSFIERMTNFDKNLPNEKVLPKHSLL | |
| | YEYFTVYNELTKVKYVTEGMRKPAFLSGEQKKAIVDLLFKTNR | |
| | KVTVKQLKEDYFKKIECFDSVEISGVEDRFNASLGTYHDLLKIIK | |
| | DKDFLDNEENEDILEDIVLTLTLFEDREMIEERLKTYAHLFDDKV | |
| | MKQLKRRRYTGWGRLSRKLINGIRDKQSGKTILDFLKSDGFANR | |
| | AFAALIADDSLTFKEDIQKAQVSGQGDSLHEHIANLAGSPAIKKG | |
| | ILQTVKVVDELVKVMGRHKPENIVIEMARENQTTQKGQKNSRE | |
| | RMKRIEEGIKELGSQILKEHPVENTQLQNEKLYLYYLQNGRDMY | |
| | VDQELDINRLSDYDVDHIVPQSFLKDDSIDNKVLTRSDKNRGKS | |
| | DNVPSEEVVKKMKNYWRQLLNAKLITQRKFDNLTKAERGGLSE | |
| | LDKAGFIKRQLVETRQITKHVAQILDSRMNTKYDENDKLIREVK | |
| | VITLKSKLVSDFRKDFQFYKVREINNYHHAHDAYLNAVVGTALI | |
| | KKYPKLESEFVYGDYKVYDVRKMIAKSEQEIGKATAKYFFYSNI | |
| | MNFFKTEITLANGEIRKRPLIETNGETGEIVWDKGRDFATVRKVL | |
| | SMPQVNIVKKTEVQTGGFSKESILPKRNSDKLIARKKDWDPKKY | |
| | GGFDSPTVAYSVLVVAKVEKGKSKKLKSVKELLGITIMERSSFE | |
| | KNPIDFLEAKGYKEVKKDLIIKLPKYSLFELENGRKRMLASAGEL | |
| | QKGNELALPSKYVNFLYLASHYEKLKGSPEDNEQKQLFVEQHK | |
| | HYLDEIIEQISEFSKRVILADANLDKVLSAYNKHRDKPIREQAENI | |
| | IHLFTLTNLGAPAAFKYFDTTIDRKRYTSTKEVLDATLIHQSITGL | |
| | YETRIDLSQLGGDEGADKRTADGSEFESPKKKRKV | |

MA065 (K855A) mRNA sequence:

| Region | Sequence | |
|---|---|---|
| 5′ | AGGAAAu′AAGAGAGAAAAGAAGAGu′AAGAAGAAAu′Au′AA | 689 |
| UTR | GAGCCACC | |
| High | Au′GAGCGAGGu′GGAGu′u′CAGCCACGAGu′ACu′GGAu′GCGG | 725 |
| fidelity | CACGCCCu′GACCCu′GGCCAAGCGGGCCCGGGACGAGCGGGA | |
| ABE | GGu′GCCCGu′GGGCGCCGu′GCu′GGu′GCu′GAACAACCGGGu′G | |
| CDS | Au′CGGCGAGGGCu′GGAACCGGGCCAu′CGGCCu′GCACGACC | |
| | CCACCGCCCACGCCGAGAu′CAu′GGCCCu′GCGGCAGGGCGGC | |
| | Cu′GGu′GAu′GCAGAACu′ACCGGCu′GAu′CGACGCCACCCu′Gu′ | |
| | ACGu′GACCu′u′CGAGCCCu′GCGu′GAu′Gu′GCGCCGGCGCCAu′ | |
| | GAu′CCACAGCCGGAu′CGGCCGGGu′GGu′Gu′u′CGGCGu′GCGG | |
| | AACGCCAAGACCGGCGCCGCCGGCAGCCu′GAu′GGACGu′GCu | |
| | ′GCACCACCCCGGCAu′GAACCACCGGGu′GGAGAu′CACCGAG | |
| | GGCAu′CCu′GGCCGACGAGu′GCGCCGCCCu′GCu′Gu′GCCGGu′ | |
| | u′Cu′u′CCGGAu′GCCCCGGCGGGu′Gu′u′CAACGCCCAGAAGAA | |
| | GGCCCAGAGCAGCACCGACAGCGGCGGCAGCAGCGGCGGCA | |
| | GCAGCGGCAGCGAGACACCCGGCACCAGCGAGAGCGCCACC | |
| | CCCGAGAGCAGCGGCGGCAGCAGCGGCGGCAGCGACAAGAA | |
| | Gu′ACAGCAu′CGGCCu′GGCCAu′CGGCACCAACAGCGu′GGGC | |
| | u′GGGCCGu′GAu′CACCGACGAGu′ACAAGGu′GCCCAGCAAGA | |
| | AGu′u′CAAGGu′GCu′GGGCAACACCGACCGGCACAGCAu′CAA | |
| | GAAGAACCu′GAu′CGGCGCCCu′GCu′Gu′u′CGACAGCGGCGAG | |
| | ACAGCCGAGGCCACCCGGCu′GAAGCGGACCGCCCGGCGGCG | |
| | Gu′ACACCCGGCGGAAGAACCGGAu′Cu′GCu′ACCu′GCAGGAG | |
| | Au′Cu′u′CAGCAACGAGAu′GGCCAAGGu′GGACGACAGCu′u′Cu | |
| | ′u′CCACCGGCu′GGAGGAGAGCu′u′CCu′GGu′GGAGGAGGACA | |
| | AGAAGCACGAGCGGCACCCCAu′Cu′u′CGGCAACAu′CGu′GGA | |
| | CGAGGu′GGCCu′ACCACGAGAAGu′ACCCCACCAu′Cu′ACCAC | |
| | Cu′GCGGAAGAAGCu′GGu′GGACAGCACCGACAAGGCCGACCU | |
| | ′GCGGCu′GAu′Cu′ACCu′GGCCCu′GGCCCACAu′GAu′CAAGu′u′ | |
| | CCGGGGCCACu′u′CCu′GAu′CGAGGGCGACCu′GAACCCCGAC | |
| | AACAGCGACGu′GGACAAGCu′Gu′u′CAu′CCAGCu′GGu′GCAGA | |
| | CCu′ACAACCAGCu′Gu′u′CGAGGAGAACCCCAu′CAACGCCAG | |
| | CGGCGu′GGACGCCAAGGCCAu′CCu′GAGCGCCCGGCu′GAGC | |
| | AAGAGCCGGCGGCu′GGAGAACCu′GAu′CGCCCAGCu′GCCCG | |
| | GCGAGAAGAAGAACGGCCu′Gu′u′CGGCAACCu′GAu′CGCCCu′ | |
| | GAGCCu′GGGCCu′GACCCCCAACu′u′CAAGAGCAACu′u′CGAC | |
| | Cu′GGCCGAGGACGCCAAGCu′GCAGCu′GAGCAAGGACACCu′ | |
| | ACGACGACGACCu′GGACAACCu′GCu′GGCCCAGAu′CGGCGA | |
| | CCAGu′ACGCCGACCu′Gu′u′CCu′GGCCGCCAAGAACCu′GAGC | |
| | GACGCCAu′CCu′GCu′GAGCGACAu′CCu′GCGGGu′GAACACCG | |
| | AGAu′CACCAAGGCCCCCCu′GAGCGCCAGCAu′GAu′CAAGCG | |
| | Gu′ACGACGAGCACCACCAGGACCu′GACCCu′GCu′GAAGGCC | |
| | Cu′GGu′GCGGCAGCAGCu′GCCCGAGAAGu′ACAAGGAGAu′Cu′ | |
| | u′Cu′u′CGACCAGAGCAAGAACGGCu′ACGCCGGCu′ACAu′CGA | |
| | CGGCGGCGCCAGCCAGGAGGAGu′u′Cu′ACAAGu′u′CAu′CAAG | |
| | CCCAu′CCu′GGAGAAGAu′GGACGGCACCGAGGAGCu′GCu′GG | |
| | u′GAAGCu′GAACCGGGAGGACCu′GCu′GCGGAAGCAGCGGAC | |
| | Cu′u′CGACAACGGCAGCAu′CCCCCACCAGAu′CCACCu′GGGC | |
| | GAGCu′GCACGCCAu′CCu′GCGGCGGCAGGAGGACu′u′Cu′ACC | |
| | CCu′u′CCu′GAAGGACAACCGGGAGAAGAu′CGAGAAGAu′CCu′ | |
| | GACCu′u′CCGGAu′CCCCu′ACu′ACGu′GGGCCCCCu′GGCCCGG | |
| | GGCAACAGCCGGu′u′CGCCu′GGAu′GACCCGCAAGAGCGAGG | |
| | AGACAAu′CACCCCCu′GGAACu′u′CGAGGAGGu′GGu′GGACAA | |
| | GGGCGCCAGCGCCCAGAGCu′u′CAu′CGAGCGGAu′GACCAACu | |
| | ′u′CGACAAGAACCu′GCCCAACGAGAAGGu′GCu′GCCCAAGCA | |
| | CAGCCu′GCu′Gu′ACGAGu′ACu′u′CACCGu′Gu′ACAACGAGCu′ | |
| | GACCAAGGu′GAAGu′ACGu′GACCGAGGGCAu′GCGGAAGCCC | |
| | GCCu′u′CCu′GAGCGGCGAGCAGAAGAAGGCCAu′CGu′GGACC | |
| | u′GCu′Gu′u′CAAGACCAACCGGAAGGu′GACCGu′GAAGCAGCu′ | |
| | GAAGGAGGACu′ACu′u′CAAGAAGAu′CGAGu′GCu′u′CGACAG | |
| | CGu′GGAGAu′CAGCGGCGu′GGAGGACCGGu′u′CAACGCCAGC | |
| | Cu′GGGCACCu′ACCACGACCu′GCu′GAAGAu′CAu′CAAGGACA | |
| | AGGACu′u′CCu′GGACAACGAGGAGAACGAGGACAu′CCu′GGA | |
| | GGACAu′CGu′GCu′GACCCu′GACCCu′Gu′u′CGAGGACCGGGAG | |
| | Au′GAu′CGAGGAGCGGCu′GAAGACCu′ACGCCCACCu′Gu′u′CG | |
| | ACGACAAGGu′GAu′GAAGCAGCu′GAAGCGGCGGCGGu′ACAC | |
| | CGGCu′GGGGCCGGCu′GAGCCGGAAGCu′GAu′CAACGGCAu′C | |
| | CGGGACAAGCAGAGCGGCAAGACCAu′CCu′GGACu′u′CCu′CA | |
| | AGAGCGACGGCu′u′CGCCAACCGGAACu′u′CAu′GCAGCu′GAu′ | |
| | CCACGACGACAGCCu′GACCu′u′CAAGGAGGACAu′CCAGAAG | |
| | GCCCAGGu′GAGCGGCCAGGGCGACAGCCu′GCACGAGCACAu | |
| | ′CGCCAACCu′GGCCGGCAGCCCCGCCAu′CAAGAAGGGCAu′C | |
| | Cu′GCAGACCGu′GAAGGu′GGu′GGACGAGCu′GGu′GAAGGu′G | |
| | Au′GGGCCGGCACAAGCCCGAGAACAu′CGu′GAu′CGAGAu′GG | |
| | CCCGGGAGAACCAGACCACCCAGAAGGGCCAGAAGAACAGC | |
| | CGGGAGCGGAu′GAAGCGGAu′CGAGGAGGGCAu′CAAGGAGC | |
| | u′GGGCAGCCAGAu′CCu′GAAGGAGCACCCCGu′GGAGAACAC | |
| | CCAGCu′GCAGAACGAGAAGCu′Gu′ACCu′Gu′ACu′ACCu′GCAG | |
| | AACGGCCGGGACAu′Gu′ACGu′GGACCAGGAGCu′GGACAu′CA | |
| | ACCGGCu′GAGCGACu′ACGACGu′GGACCACAu′CGu′GCCCCA | |
| | GAGCu′u′CCu′GAAGGACGACAGCAu′CGACAACGCCGu′GCu′G | |
| | ACCCGGAGCGACAAGAACCGGGGCAAGAGCGACAACGu′GCC | |
| | CAGCGAGGAGGu′GGu′GAAGAAGAu′GAAGAACu′ACu′GGCG | |
| | GCAGCu′GCu′GAACGCCAAGCu′GAu′CACCCAGCGGAAGu′u′C | |
| | GACAACCu′GACCAAGGCCGAGCGGGGCGGCCu′GAGCGAGCu | |
| | ′GGACAAGGCCGGCu′u′CAu′CAAGCGGCAGCu′GGu′GGAGAC | |
| | ACGGCAGAu′CACCAAGCACGu′GGCCCAGAu′CCu′GGACAGC | |
| | CGGAu′GAACACCAAGu′ACGACGAGAACGACAAGCu′GAu′CC | |
| | GGGAGGu′GAAGGu′GAu′CACCCu′CAAGAGCAAGCu′GGu′GA | |
| | GCGACu′u′CCGGAAGGACu′u′CCAGu′u′Cu′ACAAGGu′GCGGG | |
| | AGAu′CAACAACu′ACCACCACGCCCACGACGCCu′ACCu′GAAC | |
| | GCCGu′GGu′GGGCACCGCCCu′GAu′CAAGAAGu′ACCCCAAGC | |
| | u′GGAGAGCGAGu′u′CGu′Gu′ACGGCGACu′ACAAGGu′Gu′ACG | |
| | ACGu′GCGGAAGAu′GAu′CGCCAAGAGCGAGCAGGAGAu′CGG | |
| | CAAGGCCACCGCCAAGu′ACu′u′Cu′u′Cu′ACAGCAACAu′CAu′G | |
| | AACu′u′Cu′u′CAAGACCGAGAu′CACCCu′GGCCAACGGCGAGA | |
| | u′CCGGAAGCGGCCCCu′GAu′CGAGACAAACGGCGAGACAGG | |
| | CGAGAu′CGu′Gu′GGGACAAGGGCCGGGACu′u′CGCCACCGu′G | |
| | CGGAAGGu′GCu′GAGCAu′GCCCCAGGu′GAACAu′CGu′GAAGA | |
| | AGACCGAGGu′GCAGACCGGCGGCu′u′CAGCAAGGAGAGCAu′ | |
| | CCu′GCCCAAGCGGAACAGCGACAAGCu′GAu′CGCCCGGAAG | |
| | AAGGACu′GGGACCCCAAGAAGu′ACGGCGGCu′u′CGACAGCC | |
| | CCACCGu′GGCCu′ACAGCGu′GCu′GGu′GGu′GGCCAAGGu′GGA | |
| | GAAGGGCAAGAGCAAGAAGCu′CAAGAGCGu′GAAGGAGCu′G | |
| | Cu′GGGCAu′CACCAu′CAu′GGAGCGGAGCAGCu′u′CGAGAAGA | |
| | ACCCCAu′CGACu′u′CCu′GGAGGCCAAGGGCu′ACAAGGAGGu′ | |
| | GAAGAAGGACCu′GAu′CAu′CAAGCu′GCCCAAGu′ACAGCCu′G | |
| | u′u′CGAGCu′GGAGAACGGCCGGAAGCGGAu′GCu′GGCCAGCG | |
| | CCGGCGAGCu′GCAGAAGGGCAACGAGCu′GGCCCu′GCCCAGC | |
| | AAGu′ACGu′GAACu′u′CCu′Gu′ACCu′GGCCAGCCACu′ACGAGA | |
| | AGCu′GAAGGGCAGCCCCGAGGACAACGAGCAGAAGCAGCu′ | |
| | Gu′u′CGu′GGAGCAGCACAAGCACu′ACCu′GGACGAGAu′CAu′C | |
| | GAGCAGAu′CAGCGAGu′u′CAGCAAGCGGGu′GAu′CCu′GGCCG | |
| | ACGCCAACCu′GGACAAGGu′GCu′GAGCGCCu′ACAACAAGCA | |
| | CCGGGACAAGCCCAu′CCGGGAGCAGGCCGAGAACAu′CAu′CC | |
| | ACCu′Gu′u′CACCCu′GACCAACCu′GGGCGCCCCCGCCGCCu′u′ | |
| | CAAGu′ACu′u′CGACACCACCAu′CGACCGGAAGCGGu′ACACC | |
| | AGCACCAAGGAGGu′GCu′GGACGCCACCCu′GAu′CCACCAGA | |
| | GCAu′CACCGGCCu′Gu′ACGAGACACGGAu′CGACCu′GAGCCA | |
| | GCu′GGGCGGCGACGAGGGCGCCGACAAGCGGACCGCCGACG | |
| | GCAGCGAGu′u′CGAGAGCCCCAAGAAGAAGCGGAAGGu′Gu′G | |
| | A | |
| 3′ | GCGGCCGCu′u′AAu′u′AAGCu′GCCu′u′Cu′GCGGGGCu′u′GCCu′ | 700 |
| UTR | u′Cu′GGCCAu′GCCCu′u′Cu′u′Cu′Cu′CCCu′u′GCACCu′Gu′ACCu′ | |
| | Cu′u′GGu′Cu′u′u′GAAu′AAAGCCu′GAGu′AGGAAGu′Cu′AGA | |
| MA065 | MSEVEFSHEYWMRHALTLAKRARDEREVPVGAVLVLNNRVIGE | 726 |
| amino | GWNRAIGLHDPTAHAEIMALRQGGLVMQNYRLIDATLYVTFEP | |
| acid | CVMCAGAMIHSRIGRVVFGVRNAKTGAAGSLMDVLHHPGMNH | |
| sequence | RVEITEGILADECAALLCRFFRMPRRVFNAQKKAQSSTDSGGSSG | |
| | GSSGSETPGTSESATPESSGGSSGGSDKKYSIGLAIGTNSVGWAVI | |
| | TDEYKVPSKKFKVLGNTDRHSIKKNLIGALLFDSGETAEATRLK | |
| | RTARRRYTRRKNRICYLQEIFSNEMAKVDDSFFHRLEESFLVEED | |
| | KKHERHPIFGNIVDEVAYHEKYPTIYHLRKKLVDSTDKADLRLIY | |
| | LALAHMIKFRGHFLIEGDLNPDNSDVDKLFIQLVQTYNQLFEENP | |
| | INASGVDAKAILSARLSKSRRLENLIAQLPGEKKNGLFGNLIALSL | |
| | GLTPNFKSNFDLAEDAKLQLSKDTYDDDLDNLLAQIGDQYADL | |
| | FLAAKNLSDAILLSDILRVNTEITKAPLSASMIKRYDEHHQDLTL | |
| | LKALVRQQLPEKYKEIFFDQSKNGYAGYIDGGASQEEFYKFIKPI | |
| | LEKMDGTEELLVKLNREDLLRKQRTFDNGSIPHQIHLGELHAILR | |
| | RQEDFYPFLKDNREKIEKILTFRIPYYVGPLARGNSRFAWMTRKS | |
| | EETITPWNFEEVVDKGASAQSFIERMTNFDKNLPNEKVLPKHSLL | |
| | YEYFTVYNELTKVKYVTEGMRKPAFLSGEQKKAIVDLLFKTNR | |
| | KVTVKQLKEDYFKKIECFDSVEISGVEDRFNASLGTYHDLLKIIK | |
| | DKDFLDNEENEDILEDIVLTLTLFEDREMIEERLKTYAHLFDDKV | |
| | MKQLKRRRYTGWGRLSRKLINGIRDKQSGKTILDFLKSDGFANR | |
| | NFMQLIHDDSLTFKEDIQKAQVSGQGDSLHEHIANLAGSPAIKK | |
| | GILQTVKVVDELVKVMGRHKPENIVIEMARENQTTQKGQKNSR | |
| | ERMKRIEEGIKELGSQILKEHPVENTQLQNEKLYLYYLQNGRDM | |
| | YVDQELDINRLSDYDVDHIVPQSFLKDDSIDNAVLTRSDKNRGK | |
| | SDNVPSEEVVKKMKNYWRQLLNAKLITQRKFDNLTKAERGGLS | |
| | ELDKAGFIKRQLVETRQITKHVAQILDSRMNTKYDENDKLIREV | |
| | KVITLKSKLVSDFRKDFQFYKVREINNYHHAHDAYLNAVVGTA | |
| | LIKKYPKLESEFVYGDYKVYDVRKMIAKSEQEIGKATAKYFFYS | |
| | NIMNFFKTEITLANGEIRKRPLIETNGETGEIVWDKGRDFATVRK | |
| | VLSMPQVNIVKKTEVQTGGFSKESILPKRNSDKLIARKKDWDPK | |
| | KYGGFDSPTVAYSVLVVAKVEKGKSKKLKSVKELLGITIMERSS | |
| | FEKNPIDFLEAKGYKEVKKDLIIKLPKYSLFELENGRKRMLASAG | |
| | ELQKGNELALPSKYVNFLYLASHYEKLKGSPEDNEQKQLFVEQ | |
| | HKHYLDEIIEQISEFSKRVILADANLDKVLSAYNKHRDKPIREQA | |
| | ENIIHLFTLTNLGAPAAFKYFDTTIDRKRYTSTKEVLDATLIHQSI | |
| | TGLYETRIDLSQLGGDEGADKRTADGSEFESPKKKRKV | |

MA066 (eSpCas9(1.1)) mRNA sequence:

| Region | Sequence | |
|---|---|---|
| 5′ | AGGAAAu′AAGAGAGAAAAGAAGAGu′AAGAAGAAAu′Au′AA | 689 |
| UTR | GAGCCACC | |
| High | Au′GAGCGAGGu′GGAGu′u′CAGCCACGAGu′ACu′GGAu′GCGG | 727 |
| fidelity | CACGCCCu′GACCCu′GGCCAAGCGGGCCCGGGACGAGCGGGA | |
| ABE | GGu′GCCCGu′GGGCGCCGu′GCu′GGu′GCu′GAACAACCGGGu′G | |
| CDS | Au′CGGCGAGGGCu′GGAACCGGGCCAu′CGGCCu′GCACGACC | |
| | CCACCGCCCACGCCGAGAu′CAu′GGCCCu′GCGGCAGGGCGGC | |
| | Cu′GGu′GAu′GCAGAACu′ACCGGCu′GAu′CGACGCCACCCu′Gu′ | |
| | ACGu′GACCu′u′CGAGCCCu′GCGu′GAu′Gu′GCGCCGGCGCCAu′ | |
| | GAu′CCACAGCCGGAu′CGGCCGGGu′GGu′Gu′u′CGGCGu′GCGG | |
| | AACGCCAAGACCGGCGCCGCCGGCAGCCu′GAu′GGACGu′GCu | |
| | ′GCACCACCCCGGCAu′GAACCACCGGGu′GGAGAu′CACCGAG | |
| | GGCAu′CCu′GGCCGACGAGu′GCGCCGCCCu′GCu′Gu′GCCGGu′ | |
| | u′Cu′u′CCGGAu′GCCCCGGCGGGu′Gu′u′CAACGCCCAGAAGAA | |
| | GGCCCAGAGCAGCACCGACAGCGGCGGCAGCAGCGGCGGCA | |
| | GCAGCGGCAGCGAGACACCCGGCACCAGCGAGAGCGCCACC | |
| | CCCGAGAGCAGCGGCGGCAGCAGCGGCGGCAGCGACAAGAA | |
| | Gu′ACAGCAu′CGGCCu′GGCCAu′CGGCACCAACAGCGu′GGGC | |
| | u′GGGCCGu′GAu′CACCGACGAGu′ACAAGGu′GCCCAGCAAGA | |
| | AGu′u′CAAGGu′GCu′GGGCAACACCGACCGGCACAGCAu′CAA | |
| | GAAGAACCu′GAu′CGGCGCCCu′GCu′Gu′u′CGACAGCGGCGAG | |
| | ACAGCCGAGGCCACCCGGCu′GAAGCGGACCGCCCGGCGGCG | |
| | Gu′ACACCCGGCGGAAGAACCGGAu′Cu′GCu′ACCu′GCAGGAG | |
| | Au′Cu′u′CAGCAACGAGAu′GGCCAAGGu′GGACGACAGCu′u′Cu | |
| | ′u′CCACCGGCu′GGAGGAGAGCu′u′CCu′GGu′GGAGGAGGACA | |
| | AGAAGCACGAGCGGCACCCCAu′Cu′u′CGGCAACAu′CGu′GGA | |
| | CGAGGu′GGCCu′ACCACGAGAAGu′ACCCCACCAu′Cu′ACCAC | |
| | Cu′GCGGAAGAAGCu′GGu′GGACAGCACCGACAAGGCCGACCU | |
| | ′GCGGCu′GAu′Cu′ACCu′GGCCCu′GGCCCACAu′GAu′CAAGu′u′ | |
| | CCGGGGCCACu′u′CCu′GAu′CGAGGGCGACCu′GAACCCCGAC | |
| | AACAGCGACGu′GGACAAGCu′Gu′u′CAu′CCAGCu′GGu′GCAGA | |
| | CCu′ACAACCAGCu′Gu′u′CGAGGAGAACCCCAu′CAACGCCAG | |
| | CGGCGu′GGACGCCAAGGCCAu′CCu′GAGCGCCCGGCu′GAGC | |
| | AAGAGCCGGCGGCu′GGAGAACCu′GAu′CGCCCAGCu′GCCCG | |
| | GCGAGAAGAAGAACGGCCu′Gu′u′CGGCAACCu′GAu′CGCCCu′ | |
| | GAGCCu′GGGCCu′GACCCCCAACu′u′CAAGAGCAACu′u′CGAC | |
| | Cu′GGCCGAGGACGCCAAGCu′GCAGCu′GAGCAAGGACACCu′ | |
| | ACGACGACGACCu′GGACAACCu′GCu′GGCCCAGAu′CGGCGA | |
| | CCAGu′ACGCCGACCu′Gu′u′CCu′GGCCGCCAAGAACCu′GAGC | |
| | GACGCCAu′CCu′GCu′GAGCGACAu′CCu′GCGGGu′GAACACCG | |
| | AGAu′CACCAAGGCCCCCCu′GAGCGCCAGCAu′GAu′CAAGCG | |
| | Gu′ACGACGAGCACCACCAGGACCu′GACCCu′GCu′GAAGGCC | |
| | Cu′GGu′GCGGCAGCAGCu′GCCCGAGAAGu′ACAAGGAGAu′Cu′ | |
| | u′Cu′u′CGACCAGAGCAAGAACGGCu′ACGCCGGCu′ACAu′CGA | |
| | CGGCGGCGCCAGCCAGGAGGAGu′u′Cu′ACAAGu′u′CAu′CAAG | |
| | CCCAu′CCu′GGAGAAGAu′GGACGGCACCGAGGAGCu′GCu′GG | |
| | u′GAAGCu′GAACCGGGAGGACCu′GCu′GCGGAAGCAGCGGAC | |
| | Cu′u′CGACAACGGCAGCAu′CCCCCACCAGAu′CCACCu′GGGC | |
| | GAGCu′GCACGCCAu′CCu′GCGGCGGCAGGAGGACu′u′Cu′ACC | |
| | CCu′u′CCu′GAAGGACAACCGGGAGAAGAu′CGAGAAGAu′CCu′ | |
| | GACCu′u′CCGGAu′CCCCu′ACu′ACGu′GGGCCCCCu′GGCCCGG | |
| | GGCAACAGCCGGu′u′CGCCu′GGAu′GACCCGCAAGAGCGAGG | |
| | AGACAAu′CACCCCCu′GGAACu′u′CGAGGAGGu′GGu′GGACAA | |
| | GGGCGCCAGCGCCCAGAGCu′u′CAu′CGAGCGGAu′GACCAACu | |
| | ′u′CGACAAGAACCu′GCCCAACGAGAAGGu′GCu′GCCCAAGCA | |
| | CAGCCu′GCu′Gu′ACGAGu′ACu′u′CACCGu′Gu′ACAACGAGCu′ | |
| | GACCAAGGu′GAAGu′ACGu′GACCGAGGGCAu′GCGGAAGCCC | |
| | GCCu′u′CCu′GAGCGGCGAGCAGAAGAAGGCCAu′CGu′GGACC | |
| | u′GCu′Gu′u′CAAGACCAACCGGAAGGu′GACCGu′GAAGCAGCu′ | |
| | GAAGGAGGACu′ACu′u′CAAGAAGAu′CGAGu′GCu′u′CGACAG | |
| | CGu′GGAGAu′CAGCGGCGu′GGAGGACCGGu′u′CAACGCCAGC | |
| | Cu′GGGCACCu′ACCACGACCu′GCu′GAAGAu′CAu′CAAGGACA | |
| | AGGACu′u′CCu′GGACAACGAGGAGAACGAGGACAu′CCu′GGA | |
| | GGACAu′CGu′GCu′GACCCu′GACCCu′Gu′u′CGAGGACCGGGAG | |
| | Au′GAu′CGAGGAGCGGCu′GAAGACCu′ACGCCCACCu′Gu′u′CG | |
| | ACGACAAGGu′GAu′GAAGCAGCu′GAAGCGGCGGCGGu′ACAC | |
| | CGGCu′GGGGCCGGCu′GAGCCGGAAGCu′GAu′CAACGGCAu′C | |
| | CGGGACAAGCAGAGCGGCAAGACCAu′CCu′GGACu′u′CCu′CA | |
| | AGAGCGACGGCu′u′CGCCAACCGGAACu′u′CAu′GCAGCu′GAu′ | |
| | CCACGACGACAGCCu′GACCu′u′CAAGGAGGACAu′CCAGAAG | |
| | GCCCAGGu′GAGCGGCCAGGGCGACAGCCu′GCACGAGCACAu | |
| | ′CGCCAACCu′GGCCGGCAGCCCCGCCAu′CAAGAAGGGCAu′C | |
| | Cu′GCAGACCGu′GAAGGu′GGu′GGACGAGCu′GGu′GAAGGu′G | |
| | Au′GGGCCGGCACAAGCCCGAGAACAu′CGu′GAu′CGAGAu′GG | |
| | CCCGGGAGAACCAGACCACCCAGAAGGGCCAGAAGAACAGC | |
| | CGGGAGCGGAu′GAAGCGGAu′CGAGGAGGGCAu′CAAGGAGC | |
| | u′GGGCAGCCAGAu′CCu′GAAGGAGCACCCCGu′GGAGAACAC | |
| | CCAGCu′GCAGAACGAGAAGCu′Gu′ACCu′Gu′ACu′ACCu′GCAG | |
| | AACGGCCGGGACAu′Gu′ACGu′GGACCAGGAGCu′GGACAu′CA | |
| | ACCGGCu′GAGCGACu′ACGACGu′GGACCACAu′CGu′GCCCCA | |
| | GAGCu′u′CCu′GGCCGACGACAGCAu′CGACAACAAGGu′GCu′G | |
| | ACCCGGAGCGACAAGAACCGGGGCAAGAGCGACAACGu′GCC | |
| | CAGCGAGGAGGu′GGu′GAAGAAGAu′GAAGAACu′ACu′GGCG | |
| | GCAGCu′GCu′GAACGCCAAGCu′GAu′CACCCAGCGGAAGu′u′C | |
| | GACAACCu′GACCAAGGCCGAGCGGGGCGGCCu′GAGCGAGCu | |
| | ′GGACAAGGCCGGCu′u′CAu′CAAGCGGCAGCu′GGu′GGAGAC | |
| | ACGGCAGAu′CACCAAGCACGu′GGCCCAGAu′CCu′GGACAGC | |
| | CGGAu′GAACACCAAGu′ACGACGAGAACGACAAGCu′GAu′CC | |
| | GGGAGGu′GAAGGu′GAu′CACCCu′CAAGAGCAAGCu′GGu′GA | |
| | GCGACu′u′CCGGAAGGACu′u′CCAGu′u′Cu′ACAAGGu′GCGGG | |
| | AGAu′CAACAACu′ACCACCACGCCCACGACGCCu′ACCu′GAAC | |
| | GCCGu′GGu′GGGCACCGCCCu′GAu′CAAGAAGu′ACCCCGCCC | |
| | u′GGAGAGCGAGu′u′CGu′Gu′ACGGCGACu′ACAAGGu′Gu′ACG | |
| | ACGu′GCGGAAGAu′GAu′CGCCAAGAGCGAGCAGGAGAu′CGG | |
| | CAAGGCCACCGCCAAGu′ACu′u′Cu′u′Cu′ACAGCAACAu′CAu′G | |
| | AACu′u′Cu′u′CAAGACCGAGAu′CACCCu′GGCCAACGGCGAGA | |
| | u′CCGGAAGGCCCCCCu′GAu′CGAGACAAACGGCGAGACAGG | |
| | CGAGAu′CGu′Gu′GGGACAAGGGCCGGGACu′u′CGCCACCGu′G | |
| | CGGAAGGu′GCu′GAGCAu′GCCCCAGGu′GAACAu′CGu′GAAGA | |
| | AGACCGAGGu′GCAGACCGGCGGCu′u′CAGCAAGGAGAGCAu′ | |
| | CCu′GCCCAAGCGGAACAGCGACAAGCu′GAu′CGCCCGGAAG | |
| | AAGGACu′GGGACCCCAAGAAGu′ACGGCGGCu′u′CGACAGCC | |
| | CCACCGu′GGCCu′ACAGCGu′GCu′GGu′GGu′GGCCAAGGu′GGA | |
| | GAAGGGCAAGAGCAAGAAGCu′CAAGAGCGu′GAAGGAGCu′G | |
| | Cu′GGGCAu′CACCAu′CAu′GGAGCGGAGCAGCu′u′CGAGAAGA | |
| | ACCCCAu′CGACu′u′CCu′GGAGGCCAAGGGCu′ACAAGGAGGu′ | |
| | GAAGAAGGACCu′GAu′CAu′CAAGCu′GCCCAAGu′ACAGCCu′G | |
| | u′u′CGAGCu′GGAGAACGGCCGGAAGCGGAu′GCu′GGCCAGCG | |
| | CCGGCGAGCu′GCAGAAGGGCAACGAGCu′GGCCCu′GCCCAGC | |
| | AAGu′ACGu′GAACu′u′CCu′Gu′ACCu′GGCCAGCCACu′ACGAGA | |
| | AGCu′GAAGGGCAGCCCCGAGGACAACGAGCAGAAGCAGCu′ | |
| | Gu′u′CGu′GGAGCAGCACAAGCACu′ACCu′GGACGAGAu′CAu′C | |
| | GAGCAGAu′CAGCGAGu′u′CAGCAAGCGGGu′GAu′CCu′GGCCG | |
| | ACGCCAACCu′GGACAAGGu′GCu′GAGCGCCu′ACAACAAGCA | |
| | CCGGGACAAGCCCAu′CCGGGAGCAGGCCGAGAACAu′CAu′CC | |
| | ACCu′Gu′u′CACCCu′GACCAACCu′GGGCGCCCCCGCCGCCu′u′ | |
| | CAAGu′ACu′u′CGACACCACCAu′CGACCGGAAGCGGu′ACACC | |
| | AGCACCAAGGAGGu′GCu′GGACGCCACCCu′GAu′CCACCAGA | |
| | GCAu′CACCGGCCu′Gu′ACGAGACACGGAu′CGACCu′GAGCCA | |
| | GCu′GGGCGGCGACGAGGGCGCCGACAAGCGGACCGCCGACG | |
| | GCAGCGAGu′u′CGAGAGCCCCAAGAAGAAGCGGAAGGu′Gu′G | |
| | A | |
| 3′ | GCGGCCGCu′u′AAu′u′AAGCu′GCCu′u′Cu′GCGGGGCu′u′GCCu′ | 700 |
| UTR | u′Cu′GGCCAu′GCCCu′u′Cu′u′Cu′Cu′CCCu′u′GCACCu′Gu′ACCu′ | |
| | Cu′u′GGu′Cu′u′u′GAAu′AAAGCCu′GAGu′ AGGAAGu′Cu′AGA | |
| MA066 | MSEVEFSHEYWMRHALTLAKRARDEREVPVGAVLVLNNRVIGE | 728 |
| amino | GWNRAIGLHDPTAHAEIMALRQGGLVMQNYRLIDATLYVTFEP | |
| acid | CVMCAGAMIHSRIGRVVFGVRNAKTGAAGSLMDVLHHPGMNH | |
| sequence | RVEITEGILADECAALLCRFFRMPRRVFNAQKKAQSSTDSGGSSG | |
| | GSSGSETPGTSESATPESSGGSSGGSDKKYSIGLAIGTNSVGWAVI | |
| | TDEYKVPSKKFKVLGNTDRHSIKKNLIGALLFDSGETAEATRLK | |
| | RTARRRYTRRKNRICYLQEIFSNEMAKVDDSFFHRLEESFLVEED | |
| | KKHERHPIFGNIVDEVAYHEKYPTIYHLRKKLVDSTDKADLRLIY | |
| | LALAHMIKFRGHFLIEGDLNPDNSDVDKLFIQLVQTYNQLFEENP | |
| | INASGVDAKAILSARLSKSRRLENLIAQLPGEKKNGLFGNLIALSL | |
| | GLTPNFKSNFDLAEDAKLQLSKDTYDDDLDNLLAQIGDQYADL | |
| | FLAAKNLSDAILLSDILRVNTEITKAPLSASMIKRYDEHHQDLTL | |
| | LKALVRQQLPEKYKEIFFDQSKNGYAGYIDGGASQEEFYKFIKPI | |
| | LEKMDGTEELLVKLNREDLLRKQRTFDNGSIPHQIHLGELHAILR | |
| | RQEDFYPFLKDNREKIEKILTFRIPYYVGPLARGNSRFAWMTRKS | |
| | EETITPWNFEEVVDKGASAQSFIERMTNFDKNLPNEKVLPKHSLL | |
| | YEYFTVYNELTKVKYVTEGMRKPAFLSGEQKKAIVDLLFKTNR | |
| | KVTVKQLKEDYFKKIECFDSVEISGVEDRFNASLGTYHDLLKIIK | |
| | DKDFLDNEENEDILEDIVLTLTLFEDREMIEERLKTYAHLFDDKV | |
| | MKQLKRRRYTGWGRLSRKLINGIRDKQSGKTILDFLKSDGFANR | |
| | NFMQLIHDDSLTFKEDIQKAQVSGQGDSLHEHIANLAGSPAIKK | |
| | GILQTVKVVDELVKVMGRHKPENIVIEMARENQTTQKGQKNSR | |
| | ERMKRIEEGIKELGSQILKEHPVENTQLQNEKLYLYYLQNGRDM | |
| | YVDQELDINRLSDYDVDHIVPQSFLADDSIDNKVLTRSDKNRGK | |
| | SDNVPSEEVVKKMKNYWRQLLNAKLITQRKFDNLTKAERGGLS | |
| | ELDKAGFIKRQLVETRQITKHVAQILDSRMNTKYDENDKLIREV | |
| | KVITLKSKLVSDFRKDFQFYKVREINNYHHAHDAYLNAVVGTA | |
| | LIKKYPALESEFVYGDYKVYDVRKMIAKSEQEIGKATAKYFFYS | |
| | NIMNFFKTEITLANGEIRKAPLIETNGETGEIVWDKGRDFATVRK | |
| | VLSMPQVNIVKKTEVQTGGFSKESILPKRNSDKLIARKKDWDPK | |
| | KYGGFDSPTVAYSVLVVAKVEKGKSKKLKSVKELLGITIMERSS | |
| | FEKNPIDFLEAKGYKEVKKDLIIKLPKYSLFELENGRKRMLASAG | |
| | ELQKGNELALPSKYVNFLYLASHYEKLKGSPEDNEQKQLFVEQ | |
| | HKHYLDEIIEQISEFSKRVILADANLDKVLSAYNKHRDKPIREQA | |
| | ENIIHLFTLTNLGAPAAFKYFDTTIDRKRYTSTKEVLDATLIHQSI | |
| | TGLYETRIDLSQLGGDEGADKRTADGSEFESPKKKRKV | |

MA067 (eSpCas9(1.0)) mRNA sequence:

| Region | Sequence | |
|---|---|---|
| 5′ | AGGAAAu′AAGAGAGAAAAGAAGAGu′AAGAAGAAAu′Au′AA | 689 |
| UTR | GAGCCACC | |
| High | Au′GAGCGAGGu′GGAGu′u′CAGCCACGAGu′ACu′GGAu′GCGG | 729 |
| fidelity | CACGCCCu′GACCCu′GGCCAAGCGGGCCCGGGACGAGCGGGA | |
| ABE | GGu′GCCCGu′GGGCGCCGu′GCu′GGu′GCu′GAACAACCGGGu′G | |
| CDS | Au′CGGCGAGGGCu′GGAACCGGGCCAu′CGGCCu′GCACGACC | |
| | CCACCGCCCACGCCGAGAu′CAu′GGCCCu′GCGGCAGGGCGGC | |
| | Cu′GGu′GAu′GCAGAACu′ACCGGCu′GAu′CGACGCCACCCu′Gu′ | |
| | ACGu′GACCu′u′CGAGCCCu′GCGu′GAu′Gu′GCGCCGGCGCCAu′ | |
| | GAu′CCACAGCCGGAu′CGGCCGGGu′GGu′Gu′u′CGGCGu′GCGG | |
| | AACGCCAAGACCGGCGCCGCCGGCAGCCu′GAu′GGACGu′GCu | |
| | ′GCACCACCCCGGCAu′GAACCACCGGGu′GGAGAu′CACCGAG | |
| | GGCAu′CCu′GGCCGACGAGu′GCGCCGCCCu′GCu′Gu′GCCGGu′ | |
| | u′Cu′u′CCGGAu′GCCCCGGCGGGu′Gu′u′CAACGCCCAGAAGAA | |
| | GGCCCAGAGCAGCACCGACAGCGGCGGCAGCAGCGGCGGCA | |
| | GCAGCGGCAGCGAGACACCCGGCACCAGCGAGAGCGCCACC | |
| | CCCGAGAGCAGCGGCGGCAGCAGCGGCGGCAGCGACAAGAA | |
| | Gu′ACAGCAu′CGGCCu′GGCCAu′CGGCACCAACAGCGu′GGGC | |
| | u′GGGCCGu′GAu′CACCGACGAGu′ACAAGGu′GCCCAGCAAGA | |
| | AGu′u′CAAGGu′GCu′GGGCAACACCGACCGGCACAGCAu′CAA | |
| | GAAGAACCu′GAu′CGGCGCCCu′GCu′Gu′u′CGACAGCGGCGAG | |
| | ACAGCCGAGGCCACCCGGCu′GAAGCGGACCGCCCGGCGGCG | |
| | Gu′ACACCCGGCGGAAGAACCGGAu′Cu′GCu′ACCu′GCAGGAG | |
| | Au′Cu′u′CAGCAACGAGAu′GGCCAAGGu′GGACGACAGCu′u′Cu | |
| | ′u′CCACCGGCu′GGAGGAGAGCu′u′CCu′GGu′GGAGGAGGACA | |
| | AGAAGCACGAGCGGCACCCCAu′Cu′u′CGGCAACAu′CGu′GGA | |
| | CGAGGu′GGCCu′ACCACGAGAAGu′ACCCCACCAu′Cu′ACCAC | |
| | Cu′GCGGAAGAAGCu′GGu′GGACAGCACCGACAAGGCCGACCU | |
| | ′GCGGCu′GAu′Cu′ACCu′GGCCCu′GGCCCACAu′GAu′CAAGu′u′ | |
| | CCGGGGCCACu′u′CCu′GAu′CGAGGGCGACCu′GAACCCCGAC | |
| | AACAGCGACGu′GGACAAGCu′Gu′u′CAu′CCAGCu′GGu′GCAGA | |
| | CCu′ACAACCAGCu′Gu′u′CGAGGAGAACCCCAu′CAACGCCAG | |
| | CGGCGu′GGACGCCAAGGCCAu′CCu′GAGCGCCCGGCu′GAGC | |
| | AAGAGCCGGCGGCu′GGAGAACCu′GAu′CGCCCAGCu′GCCCG | |
| | GCGAGAAGAAGAACGGCCu′Gu′u′CGGCAACCu′GAu′CGCCCu′ | |
| | GAGCCu′GGGCCu′GACCCCCAACu′u′CAAGAGCAACu′u′CGAC | |
| | Cu′GGCCGAGGACGCCAAGCu′GCAGCu′GAGCAAGGACACCu′ | |
| | ACGACGACGACCu′GGACAACCu′GCu′GGCCCAGAu′CGGCGA | |
| | CCAGu′ACGCCGACCu′Gu′u′CCu′GGCCGCCAAGAACCu′GAGC | |
| | GACGCCAu′CCu′GCu′GAGCGACAu′CCu′GCGGGu′GAACACCG | |
| | AGAu′CACCAAGGCCCCCCu′GAGCGCCAGCAu′GAu′CAAGCG | |
| | Gu′ACGACGAGCACCACCAGGACCu′GACCCu′GCu′GAAGGCC | |
| | Cu′GGu′GCGGCAGCAGCu′GCCCGAGAAGu′ACAAGGAGAu′Cu′ | |
| | u′Cu′u′CGACCAGAGCAAGAACGGCu′ACGCCGGCu′ACAu′CGA | |
| | CGGCGGCGCCAGCCAGGAGGAGu′u′Cu′ACAAGu′u′CAu′CAAG | |
| | CCCAu′CCu′GGAGAAGAu′GGACGGCACCGAGGAGCu′GCu′GG | |
| | u′GAAGCu′GAACCGGGAGGACCu′GCu′GCGGAAGCAGCGGAC | |
| | Cu′u′CGACAACGGCAGCAu′CCCCCACCAGAu′CCACCu′GGGC | |
| | GAGCu′GCACGCCAu′CCu′GCGGCGGCAGGAGGACu′u′Cu′ACC | |
| | CCu′u′CCu′GAAGGACAACCGGGAGAAGAu′CGAGAAGAu′CCu′ | |
| | GACCu′u′CCGGAu′CCCCu′ACu′ACGu′GGGCCCCCu′GGCCCGG | |
| | GGCAACAGCCGGu′u′CGCCu′GGAu′GACCCGCAAGAGCGAGG | |
| | AGACAAu′CACCCCCu′GGAACu′u′CGAGGAGGu′GGu′GGACAA | |
| | GGGCGCCAGCGCCCAGAGCu′u′CAu′CGAGCGGAu′GACCAACu | |
| | ′u′CGACAAGAACCu′GCCCAACGAGAAGGu′GCu′GCCCAAGCA | |
| | CAGCCu′GCu′Gu′ ACGAGu′ACu′u′CACCGu′Gu′ACAACGAGCu′ | |
| | GACCAAGGu′GAAGu′ACGu′GACCGAGGGCAu′GCGGAAGCCC | |
| | GCCu′u′CCu′GAGCGGCGAGCAGAAGAAGGCCAu′CGu′GGACC | |
| | u′GCu′Gu′u′CAAGACCAACCGGAAGGu′GACCGu′GAAGCAGCu′ | |
| | GAAGGAGGACu′ACu′u′CAAGAAGAu′CGAGu′GCu′u′CGACAG | |
| | CGu′GGAGAu′CAGCGGCGu′GGAGGACCGGu′u′CAACGCCAGC | |
| | Cu′GGGCACCu′ACCACGACCu′GCu′GAAGAu′CAu′CAAGGACA | |
| | AGGACu′u′CCu′GGACAACGAGGAGAACGAGGACAu′CCu′GGA | |
| | GGACAu′CGu′GCu′GACCCu′GACCCu′Gu′u′CGAGGACCGGGAG | |
| | Au′GAu′CGAGGAGCGGCu′GAAGACCu′ACGCCCACCu′Gu′u′CG | |
| | ACGACAAGGu′GAu′GAAGCAGCu′GAAGCGGCGGCGGu′ACAC | |
| | CGGCu′GGGGCCGGCu′GAGCCGGAAGCu′GAu′CAACGGCAu′C | |
| | CGGGACAAGCAGAGCGGCAAGACCAu′CCu′GGACu′u′CCu′CA | |
| | AGAGCGACGGCu′u′CGCCAACCGGAACu′u′CAu′GCAGCu′GAu′ | |
| | CCACGACGACAGCCu′GACCu′u′CAAGGAGGACAu′CCAGAAG | |
| | GCCCAGGu′GAGCGGCCAGGGCGACAGCCu′GCACGAGCACAu | |
| | ′CGCCAACCu′GGCCGGCAGCCCCGCCAu′CAAGAAGGGCAu′C | |
| | Cu′GCAGACCGu′GAAGGu′GGu′GGACGAGCu′GGu′GAAGGu′G | |
| | Au′GGGCCGGCACAAGCCCGAGAACAu′CGu′GAu′CGAGAu′GG | |
| | CCCGGGAGAACCAGACCACCCAGAAGGGCCAGAAGAACAGC | |
| | CGGGAGCGGAu′GAAGCGGAu′CGAGGAGGGCAu′CAAGGAGC | |
| | u′GGGCAGCCAGAu′CCu′GAAGGAGCACCCCGu′GGAGAACAC | |
| | CCAGCu′GCAGAACGAGGCCCu′Gu′ACCu′Gu′ACu′ACCu′GCAG | |
| | AACGGCCGGGACAu′Gu′ACGu′GGACCAGGAGCu′GGACAu′CA | |
| | ACCGGCu′GAGCGACu′ACGACGu′GGACCACAu′CGu′GCCCCA | |
| | GAGCu′u′CCu′GAAGGACGACAGCAu′CGACAACAAGGu′GCu′G | |
| | ACCCGGAGCGACAAGAACCGGGGCAAGAGCGACAACGu′GCC | |
| | CAGCGAGGAGGu′GGu′GAAGAAGAu′GAAGAACu′ACu′GGCG | |
| | GCAGCu′GCu′GAACGCCAAGCu′GAu′CACCCAGCGGAAGu′u′C | |
| | GACAACCu′GACCAAGGCCGAGCGGGGCGGCCu′GAGCGAGCu | |
| | ′GGACAAGGCCGGCu′u′CAu′CAAGCGGCAGCu′GGu′GGAGAC | |
| | ACGGCAGAu′CACCAAGCACGu′GGCCCAGAu′CCu′GGACAGC | |
| | CGGAu′GAACACCAAGu′ACGACGAGAACGACAAGCu′GAu′CC | |
| | GGGAGGu′GAAGGu′GAu′CACCCu′CAAGAGCAAGCu′GGu′GA | |
| | GCGACu′u′CCGGAAGGACu′u′CCAGu′u′Cu′ACAAGGu′GCGGG | |
| | AGAu′CAACAACu′ACCACCACGCCCACGACGCCu′ACCu′GAAC | |
| | GCCGu′GGu′GGGCACCGCCCu′GAu′CAAGAAGu′ACCCCGCCC | |
| | u′GGAGAGCGAGu′u′CGu′Gu′ACGGCGACu′ACAAGGu′Gu′ACG | |
| | ACGu′GCGGAAGAu′GAu′CGCCAAGAGCGAGCAGGAGAu′CGG | |
| | CAAGGCCACCGCCAAGu′ACu′u′Cu′u′Cu′ACAGCAACAu′CAu′G | |
| | AACu′u′Cu′u′CAAGACCGAGAu′CACCCu′GGCCAACGGCGAGA | |
| | u′CCGGAAGGCCCCCCu′GAu′CGAGACAAACGGCGAGACAGG | |
| | CGAGAu′CGu′Gu′GGGACAAGGGCCGGGACu′u′CGCCACCGu′G | |
| | CGGAAGGu′GCu′GAGCAu′GCCCCAGGu′GAACAu′CGu′GAAGA | |
| | AGACCGAGGu′GCAGACCGGCGGCu′u′CAGCAAGGAGAGCAu′ | |
| | CCu′GCCCAAGCGGAACAGCGACAAGCu′GAu′CGCCCGGAAG | |
| | AAGGACu′GGGACCCCAAGAAGu′ACGGCGGCu′u′CGACAGCC | |
| | CCACCGu′GGCCu′ACAGCGu′GCu′GGu′GGu′GGCCAAGGu′GGA | |
| | GAAGGGCAAGAGCAAGAAGCu′CAAGAGCGu′GAAGGAGCu′G | |
| | Cu′GGGCAu′CACCAu′CAu′GGAGCGGAGCAGCu′u′CGAGAAGA | |
| | ACCCCAu′CGACu′u′CCu′GGAGGCCAAGGGCu′ACAAGGAGGu′ | |
| | GAAGAAGGACCu′GAu′CAu′CAAGCu′GCCCAAGu′ACAGCCu′G | |
| | u′u′CGAGCu′GGAGAACGGCCGGAAGCGGAu′GCu′GGCCAGCG | |
| | CCGGCGAGCu′GCAGAAGGGCAACGAGCu′GGCCCu′GCCCAGC | |
| | AAGu′ACGu′GAACu′u′CCu′Gu′ACCu′GGCCAGCCACu′ACGAGA | |
| | AGCu′GAAGGGCAGCCCCGAGGACAACGAGCAGAAGCAGCu′ | |
| | Gu′u′CGu′GGAGCAGCACAAGCACu′ACCu′GGACGAGAu′CAu′C | |
| | GAGCAGAu′CAGCGAGu′u′CAGCAAGCGGGu′GAu′CCu′GGCCG | |
| | ACGCCAACCu′GGACAAGGu′GCu′GAGCGCCu′ACAACAAGCA | |
| | CCGGGACAAGCCCAu′CCGGGAGCAGGCCGAGAACAu′CAu′CC | |
| | ACCu′Gu′u′CACCCu′GACCAACCu′GGGCGCCCCCGCCGCCu′u′ | |
| | CAAGu′ACu′u′CGACACCACCAu′CGACCGGAAGCGGu′ACACC | |
| | AGCACCAAGGAGGu′GCu′GGACGCCACCCu′GAu′CCACCAGA | |
| | GCAu′CACCGGCCu′Gu′ACGAGACACGGAu′CGACCu′GAGCCA | |
| | GCu′GGGCGGCGACGAGGGCGCCGACAAGCGGACCGCCGACG | |
| | GCAGCGAGu′u′CGAGAGCCCCAAGAAGAAGCGGAAGGu′Gu′G | |
| | A | |
| 3′ | GCGGCCGCu′u′AAu′u′AAGCu′GCCu′u′Cu′GCGGGGCu′u′GCCu′ | 700 |
| UTR | u′Cu′GGCCAu′GCCCu′u′Cu′u′Cu′Cu′CCCu′u′GCACCu′Gu′ACCu′ | |
| | Cu′u′GGu′Cu′u′u′GAAu′AAAGCCu′GAGu′AGGAAGu′Cu′AGA | |
| | MSEVEFSHEYWMRHALTLAKRARDEREVPVGAVLVLNNRVIGE | 730 |
| MA067 | GWNRAIGLHDPTAHAEIMALRQGGLVMQNYRLIDATLYVTFEP | |
| amino | CVMCAGAMIHSRIGRVVFGVRNAKTGAAGSLMDVLHHPGMNH | |
| acid | RVEITEGILADECAALLCRFFRMPRRVFNAQKKAQSSTDSGGSSG | |
| sequence | GSSGSETPGTSESATPESSGGSSGGSDKKYSIGLAIGTNSVGWAVI | |
| | TDEYKVPSKKFKVLGNTDRHSIKKNLIGALLFDSGETAEATRLK | |
| | RTARRRYTRRKNRICYLQEIFSNEMAKVDDSFFHRLEESFLVEED | |
| | KKHERHPIFGNIVDEVAYHEKYPTIYHLRKKLVDSTDKADLRLIY | |
| | LALAHMIKFRGHFLIEGDLNPDNSDVDKLFIQLVQTYNQLFEENP | |
| | INASGVDAKAILSARLSKSRRLENLIAQLPGEKKNGLFGNLIALSL | |
| | GLTPNFKSNFDLAEDAKLQLSKDTYDDDLDNLLAQIGDQYADL | |
| | FLAAKNLSDAILLSDILRVNTEITKAPLSASMIKRYDEHHQDLTL | |
| | LKALVRQQLPEKYKEIFFDQSKNGYAGYIDGGASQEEFYKFIKPI | |
| | LEKMDGTEELLVKLNREDLLRKQRTFDNGSIPHQIHLGELHAILR | |
| | RQEDFYPFLKDNREKIEKILTFRIPYYVGPLARGNSRFAWMTRKS | |
| | EETITPWNFEEVVDKGASAQSFIERMTNFDKNLPNEKVLPKHSLL | |
| | YEYFTVYNELTKVKYVTEGMRKPAFLSGEQKKAIVDLLFKTNR | |
| | KVTVKQLKEDYFKKIECFDSVEISGVEDRFNASLGTYHDLLKIIK | |
| | DKDFLDNEENEDILEDIVLTLTLFEDREMIEERLKTYAHLFDDKV | |
| | MKQLKRRRYTGWGRLSRKLINGIRDKQSGKTILDFLKSDGFANR | |
| | NFMQLIHDDSLTFKEDIQKAQVSGQGDSLHEHIANLAGSPAIKK | |
| | GILQTVKVVDELVKVMGRHKPENIVIEMARENQTTQKGQKNSR | |
| | ERMKRIEEGIKELGSQILKEHPVENTQLQNEALYLYYLQNGRDM | |
| | YVDQELDINRLSDYDVDHIVPQSFLKDDSIDNKVLTRSDKNRGK | |
| | SDNVPSEEVVKKMKNYWRQLLNAKLITQRKFDNLTKAERGGLS | |
| | ELDKAGFIKRQLVETRQITKHVAQILDSRMNTKYDENDKLIREV | |
| | KVITLKSKLVSDFRKDFQFYKVREINNYHHAHDAYLNAVVGTA | |
| | LIKKYPALESEFVYGDYKVYDVRKMIAKSEQEIGKATAKYFFYS | |
| | NIMNFFKTEITLANGEIRKAPLIETNGETGEIVWDKGRDFATVRK | |
| | VLSMPQVNIVKKTEVQTGGFSKESILPKRNSDKLIARKKDWDPK | |
| | KYGGFDSPTVAYSVLVVAKVEKGKSKKLKSVKELLGITIMERSS | |
| | FEKNPIDFLEAKGYKEVKKDLIIKLPKYSLFELENGRKRMLASAG | |
| | ELQKGNELALPSKYVNFLYLASHYEKLKGSPEDNEQKQLFVEQ | |
| | HKHYLDEIIEQISEFSKRVILADANLDKVLSAYNKHRDKPIREQA | |
| | ENIIHLFTLTNLGAPAAFKYFDTTIDRKRYTSTKEVLDATLIHQSI | |
| | TGLYETRIDLSQLGGDEGADKRTADGSEFESPKKKRKV | |

Chemistry and modification used MA040, MA041, MA045, MA064 MA065, MA066, and MA067 mRNAs:
-u′ = N¹-methyl pseudouridine
-The first nucleotide in the 5′ UTR has a 2′-O-methyl modification
-The first nucleotide in the 5′ UTR is linked via a 5′-5′ triphosphate bridge to a 7-methylguanosine nucleoside
-mRNAs have a 3′ poly A region

### Example 8. gRNA Variants

[0547] Exemplary PCSK9 guide RNA variants are shown in Table 3. Additional exemplary PCSK9 guide RNA variants can be found in PCT Application Publication NO. WO2021/207712, which is incorporated herein by reference in its entirety. The on-target editing efficiency of those PCSK9 guides are shown in FIGS. 21-23.

[0548] Exemplary ANGPTL3 guide RNA variants are shown in Table 3 and Table 8. Additional exemplary ANGPTL3 guide RNA variants can be found in PCT Application Publication NO. WO2021/207712, which is incorporated herein by reference in its entirety. The on-target editing efficiency of the variant ANGPTL3 guides are shown in FIG. 17 and FIG. 18.

### Assessment of Proliferation of Edited Cells (HuH-7s):

[0549] As previously described, In vitro efficacy of exemplary gRNAs and ABE mRNAs was evaluated by transfecting the cells and with the specified concentrations, collecting the cells after transfection (3 days) and analyzing the editing percentage using PCR and sequencing as previously described.

TABLE 3
GA347 Protospacer with Nebularine (E) and Inosine (I/i) modifications

| | | | SEQ | | SEQ |
|---|---|---|---|---|---|
| Gene | gRNA | Protospacer | ID | | ID |
| Target | ID | (5′-3′) | NO | Sequence (5′-3′) | NO. |
| CANG | GA539 | AAGATAC | 177 | asasgsAUXCCUGAAUAACCCUCgUUU | 757 |
| PTL3 | | CTGAATA | | UAGagcuaGaaauagcaaGUUaAaAuAaggcu | |
| | | ACTCTC | | aGUccGUUAucAAcuuGaaaaagugGcaccga | |
| | | | | gucggugcusususu | |
| CANG | GA540 | AAGATAC | 177 | asasgsAUXCCUGXAUAACCCUCgUUU | 758 |
| PTL3 | | CTGAATA | | UAGagcuaGaaauagcaaGUUaAaAuAaggcu | |
| | | ACTCTC | | aGUccGUUAucAAcuuGaaaaagugGcaccga | |
| | | | | gucggugcusususu | |
| CANG | GA541 | AAGATAC | 177 | asasgsAUXCCUGAAUAXCCCUCgUUU | 759 |
| PTL3 | | CTGAATA | | UAGagcuaGaaauagcaaGUUaAaAuAaggcu | |
| | | ACTCTC | | aGUccGUUAucAAcuuGaaaaagugGcaccga | |
| | | | | gucggugcusususu | |
| CANG | GA542 | AAGATAC | 177 | asasgsAUXCCUGXAUXACCCUCgUUU | 760 |
| PTL3 | | CTGAATA | | UAGagcuaGaaauagcaaGUUaAaAuAaggcu | |
| | | ACTCTC | | aGUccGUUAucAAcuuGaaaaagugGcaccga | |
| | | | | gucggugcusususu | |
| CANG | GA543 | AAGATAC | 177 | asasgsXUXCCUGAAUAACCCUCgUUU | 761 |
| PTL3 | | CTGAATA | | UAGagcuaGaaauagcaaGUUaAaAuAaggcu | |
| | | ACTCTC | | aGUccGUUAucAAcuuGaaaaagugGcaccga | |
| | | | | gucggugcusususu | |
| CANG | GA544 | AAGATAC | 177 | asasgsXUXCCUGAAUAXCCCUCgUUU | 762 |
| PTL3 | | CTGAATA | | UAGagcuaGaaauagcaaGUUaAaAuAaggcu | |
| | | ACTCTC | | aGUccGUUAucAAcuuGaaaaagugGcaccga | |
| | | | | gucggugcusususu | |
| cANG | GA545 | AAGATAC | 177 | asasgsXUACCUGAAUXACCCUCgUUU | 763 |
| PTL3 | | CTGAATA | | UAGagcuaGaaauagcaaGUUaAaAuAaggcu | |
| | | ACTCTC | | aGUccGUUAucAAcuuGaaaaagugGcaccga | |
| | | | | gucggugcusususu | |
| CANG | GA546 | AAGATAC | 177 | asasgsAUACCUGXAUAACCCUCgUUU | 764 |
| PTL3 | | CTGAATA | | UAGagcuaGaaauagcaaGUUaAaAuAaggcu | |
| | | ACTCTC | | aGUccGUUAucAAcuuGaaaaagugGcaccga | |
| | | | | gucggugcusususu | |
| CANG | GA548 | AAGATAC | 177 | asasgsAUACCUGEAUAXCCCUCgUUU | 765 |
| PTL3 | | CTGAATA | | UAGagcuaGaaauagcaaGUUaAaAuAaggcu | |
| | | ACTCTC | | aGUccGUUAucAAcuuGaaaaagugGcaccga | |
| | | | | gucggugcusususu | |
| CANG | GA549 | AAGATAC | 177 | asasgsAUXCCUGAAUAXCCCUCgUUU | 759 |
| PTL3 | | CTGAATA | | UAGagcuaGaaauagcaaGUUaAaAuAaggcu | |
| | | ACTCTC | | aGUccGUUAucAAcuuGaaaaagugGcaccga | |
| | | | | gucggugcusususu | |
| CANG | GA613 | AAGATAC | 177 | asasisAUACCUGAAUAACUCUCgUUU | 766 |
| PTL3 | | CTGAATA | | UAGagcuaGaaauagcaaGUUaAaAuAaggcu | |
| | | ACTCTC | | aGUccGUUAucAAcuuGaaaaagugGcaccga | |
| | | | | gucggugcusususu | |
| CANG | GA614 | AAGATAC | 177 | asasisAUACCUIAAUAACUCUCgUUUU | 767 |
| PTL3 | | CTGAATA | | AGagcuaGaaauagcaaGUUaAaAuAaggcua | |
| | | ACTCTC | | GUccGUUAucAAcuuGaaaaagugGcaccgag | |
| | | | | ucggugcusususu | |

Uppercase nucleotides (A, G, C, I and T) indicate 2′-deoxyribonucleotides, adenine, guanine, cytosine, inosine, and thymine, respectively; in Guide RNA sequence: uppercase nucleotides (A, C, G, I and U) indicate ribonucleotides, adenine, guanine, cytosine, inosine, and uracil, respectively and lowercase nucleotides (a, g, c, i and u) indicate 2′-O-methylribonucleotide (2′-OMe) unless otherwise specified.
X is nebularine.
It is understood that the DNA protospacer is converted to RNA or RNA-equivalent in the guide RNA
s: phosphorothioate (PS).

### Example 9. Human Dosing (ABE MA004, GA346, 1:1 mRNA:RNA Ratio by Weight Encapsulated in an LNP Comprising Ionizable Amino Lipid and PEG-Lipid)

[0550] The human pharmacokinetic (PK) parameters (i.e., clearance [CL] and volume of distribution at steady state [Vss]) for Ionizable Amino Lipid, PEG-Lipid, and MA-004 were predicted based on the PK parameters in cynomolgus monkeys using allometric scaling with 0.75 and 1 as the exponent for CL and Vss, respectively. The cynomolgus monkeys were dosed with the total RNA dose ranging from 0.5 to 2.5 mg/kg; within this dose range, the PK parameters were relatively constant. The concentration versus time profiles in humans following different total RNA doses using graded infusions were simulated using a one-compartmental model and Berkeley Madonna® Version 8.3.18 was used for the simulations. The predicted plasma maximum concentration (Cmax) in humans were obtained based on the concentration versus time profiles. The area under the plasma concentration-time curve from time zero to infinity (AUCinf) predicted in humans was calculated as the ratio of the analyte dose over the predicted CL value.

[0551] The relationship between Ionizable Amino Lipid AUCinf (after a single dose) and PCSK9% reduction at steady state in cynomolgus monkeys was analyzed using an inhibitory Imax function, and R Software Version 3.6.1 and RStudio Version 1.2.5001 were used for the fitting and plotting. Based on the inhibitory Imax function, Ionizable Amino Lipid AUCinf value associated with 50% of maximal inhibition (AUC50) in cynomolgus monkeys was estimated. This AUC50 value was used to predict human PCSK9 reduction assuming an ABE mRNA MA004 and guide RNA GA346 is equipotent between cynomolgus monkeys and humans. Alternatively, this AUC50 value was divided by 3 and then used to predict human PCSK9 reduction assuming an ABE mRNA MA004 and guide RNA GA346 is 3-fold more potent in humans than in cynomolgus monkeys based on the in vitro testing results of an ABE mRNA MA004 and guide RNA GA346 in primary cynomolgus monkey hepatocytes (PCH) and primary human hepatocytes (PHH). With either scenario (equipotency or 3-fold difference in potency), Ionizable Amino Lipid AUCinf values predicted in humans were used to predict PCSK9% reduction at steady state following different total RNA doses.

[0552] Ionizable Amino Lipid AUC in the plasma was used as a surrogate of LNP constituted with an ABE mRNA MA004 and guide RNA GA346 exposure in the plasma and ultimately LNP constituted with an ABE mRNA MA004 and guide RNA GA346 exposure in the liver where the editing takes place.

[0553] The relationship between Ionizable Amino Lipid exposure (area under the plasma concentration-time curve [AUC]) and PCSK9 percentage reduction was characterized in NHP. To estimate pharmacological activity in humans at various dose levels, Ionizable Amino Lipid exposure (AUC) in humans was predicted using allometric scaling and subsequently percentage of PCSK9 reduction was estimated. The tables in FIGS. 24 and 25 present the predicted Cmax, AUC and potency for humans at various doses. As noted therein the 0.1 mg/kg total RNA dose is estimated to exhibit approximately 54.4% to 75.8% PCSK9 reduction (considering a 1× to 3×potency factor) in a participant weighing 75 kg. The body weight effect (across the range of 45 kg to 100 kg) on PCSK9 was predicted to be minimal (with an absolute difference ≤3% relative to 75 kg) for a given mg/kg total RNA dose. As set forth in the table in FIG. 25, 0.8 mg/kg total RNA dose is estimated to exhibit approximately 86.5% to 91.8% PCSK9 reduction (considering a 1× to 3× potency factor) in a participant weighing 75 kg. The predicted Cmax and AUC levels relative to those observed in NHP models dosed at 2 mg/Kg are presented in the table in FIG. 24.

### Example 10. On-Target and Off-Target Editing Rates in Primary Human Hepatocytes (PHH)

[0554] This example illustrates the use of the guide nucleic acids comprising the spacer sequences (sgRDNA) to evaluate their on-targeting editing percentage of ANGPTL3 gene at either position 6 or positions 1-10 of protospacer region in the ANGPTL3 gene in PHH cells (FIGS. 29-30).

[0555] Twenty (20) sgRDNA spacer sequence variants with minimally modified tracrRNA (GA675-GA694, SEQ ID NOs: 72, 75, 79, 83, 86, 89, 93, 96, 98, 100, 102, 106, 110, 114, 116, 120, 124, 128, 132, 136, Table 7) were transfected into PHH cells (lot STL) together with mRNA MA079 according to the protocol of MessengerMax™. The term “minimal modified tracrRNA” refers to a tracrRNA of sequence GUUUUAGAGCUAGAAAUAGCAAGUUAAAAUAAGGCUAGUCCGUUAUCAACUUGA AAAAGUGGCACCGAGUCGGUGCUsususu (SEQ ID NO: 3). Control groups were (a) gRNA GA441 (2′-OMe-enriched tracrRNA) transfected with mRNA MA004, and (b) gRNA GA441 (2′-OMe-enriched tracrRNA) transfected with mRNA MA079. The term “2′-OMe-enriched tracrRNA” refers to a tracr of sequence of gUUUUAGagcuaGaaauagcaaGUUaAaAuAaggcuaGUccGUUAucAAcuuGaaaaagugGcaccgaguc ggugcusususu (SEQ ID NO: 4). The doses of the total RNA were 5,000 ng/mL, 2,500 ng/mL, 1,250 ng/mL, and 625 ng/mL. On-target primer (GAO100_OT_B1) was used to measure editing percentage (A>G) in position 1-10 of protospacer region in the ANGPTL3 gene by Targeted Amplicon Sequencing. Technical replicates were performed. N refers to any non-A nucleotide detected at this position in the sequencing data.

[0556] The genomic DNA from PHH cells transfected with one of 20 sgRDNA spacer sequence variants were also tested for off-target editing percentage by targeted amplicon sequencing (FIGS. 31-32). The genomic DNA samples assessed were from cells that received doses of the total RNA of 5,000 ng/mL and 2,500 ng/mL. OT1 primer (GA0100_OT_B2) was used to measure editing percentage (A>G) in position 1-10 of the OT1 site (Table. 4). Technical replicates were performed. The results suggest that majority of the sgRDNA spacer sequences was not binding to and/or editing at OT1. For the rest of the sgRDNAs comprising spacer sequences that indeed edited at OT1 (GA680, GA689, GA690, GA687), about 75% of them have only 2-3 DNA bases.

TABLE 4
Information Regarding the Off-target Site (OT1)

| | | VEP | | CADD | |
|---|---|---|---|---|---|
| Site ID | Alignment | Gene | VEP Consequence | score | COSMIC |
| Chr8_66947473_(+) | RNA21 | TCF24 | 3′UTR, | 6.92 | No |
| | | | downstream gene | | |

[0557] Table. 4 shows the information about the off-target site (OT1) assessed in the experiments. Alignment indicates how OT1 differs in sequence from the on-target protospacer sequence—there are 2 mismatches and 1 RNA bulge, which occurs when the genome sequence contains a deletion with respect to the crRNA sequence of the gRNA (i.e., there is a deficit of paired nucleotide in the genome sequence). VEP Gene and VEP Consequence refer to the genomic location and functional role of OT1 as determined by the Ensembl Variant Effect Predictor (VEP) tool v98.3. Ensembl VEP uses an extensive collection of genomic annotations, including transcript models, regulatory features, and variant data, for the human genome, to allow the analysis, annotation and interpretation of genomic variants, or in this case hypothetical editing, in both protein-coding and non-protein-coding regions of the genome. The CADD score was determined using the Combined Annotation-Dependent Depletion v1.6 (CADD) framework, which aims to annotate and interpret human genetic variation through the integration of diverse annotations into a single measure. The CADD score can be used to assess the functional impact of editing at off-target sites on cellular function; a Phred-scaled CADD score of 10 or greater indicates that an edit at that site is in the top 10% of likelihood of having a functional effect. Thus, the CADD score of 6.92 suggests that there is not a high likelihood that editing at OT1 will have a functional consequence. To bioinformatically assess the potential for oncogenesis due to editing at the off-target site, it was assessed whether OT1 is located within a gene in the Cancer Gene Census of the Catalogue of Somatic Mutations in Cancer (COSMIC) v92; it is not.

[0558] Additional 21 sgRDNA spacer sequence variants with minimally modified tracrRNA (GA695-GA715, Table 7) were transfected into PHH cells (lot STL) together with mRNA MA079 according to the protocol of MessengerMax™. Control groups were (a) gRNA GA441 (2′-OMe-enriched tracrRNA) transfected with mRNA MA004, and (b) gRNA GA441 (2′-OMe-enriched tracrRNA) transfected with mRNA MA079. The doses of the total RNA were 5,000 ng/mL and 2,500 ng/mL. On-target primer (GA0100_OT_B1) was used to measure editing percentage (A>N) in position 6 of the protospacer region in the ANGPTL3 gene by Targeted Amplicon sequencing. Technical replicates were performed (FIG. 33 illustrates the data of this study).

[0559] Sixteen (16) sgRDNA spacer sequence variants with minimally modified tracrRNA (GA675, GA677, GA678, GA680, GA682, GA683, GA685, GA686, GA687, GA688, GA689, GA690, GA691, GA692, GA693, GA694) were selected and transfected into PHH cells (lot IRZ) together with mRNA MA079 according to the protocol of MessengerMax™. Control groups were gRNA GA441 (2′-OMe-enriched tracrRNA) transfected with mRNA MA079. The dose of the total RNA was 5,000 ng/mL. On-target primer (GA0100_OT_B1) was used to measure editing percentage (A>G) in positions 1-10 of protospacer region in the ANGPTL3 gene. OT1 primer (GA0100_OT_B2) and OT3 primer (GA0100_OT_B6) were used to measure off-target editing percentage (A>G) in positions 1-10 of the off-target sites. Technical replicates were performed (FIG. 34 presents data from this study).

[0560] The genomic DNA from PHH cells transfected with 16 sgRDNA spacer sequence variants were further tested for off-target editing according to the protocol of SureSelect (FIGS. 35A-35B). For FIG. 35A, the input DNA for SureSelect assay was 50 ng, and a panel of RNA probes targeting 611 candidate off-target sites derived from ONE-seq with GA441 was used. For FIG. 35B, Targeted Amplicon was not used for assessment independently. In a separate experiment, 10 top sgRNA spacer sequence variants with minimally modified tracrRNA were selected and transfected with MA079 in PHH cells (lot IRZ) according to the protocol of MessengerMax™. Control group was gRNA GA441 (2′-OMe-enriched tracrRNA) transfected with MA079. The input DNA for SureSelect assay was 150 ng, and a panel of RNA probes targeting 611 candidate off-target sites derived from ONE-seq with GA441 was used. The plot shows net editing percentage of significant sites (non-adjusted pᵥₐₗ<0.05) and ordered by on-target potency.

[0561] Sixteen (16) sgRDNA comprising the spacer sequence variants with minimally modified tracrRNA were selected and transfected via GalNAc LNPs in PHH cells (lot IRZ) by LNP transfection in two separate experiments. Control groups were two different GalNAc LNPs containing gRNA GA441 (2′-OMe-enriched tracrRNA) and MA079. The doses were 5,000 ng/TA/mL for one experiment and 10,000 ng/TA/mL for the other experiment. On-target primer (GAO100_OT_B1) was used to measure editing percentage (A>G) in positions 1-10 of protospacer region in the ANGPTL3 gene by Targeted Amplicon sequencing. Technical replicates were performed (FIG. 36A presents data from this study).

[0562] Table 5 shows the LNP formulations used for generating LNP transfection in vitro data described in FIGS. 36A, 36B, 37, 39A, 39B, 40, 41A and 41B.

TABLE 5
LNP formulations

| | | LNPs | | | | |
|---|---|---|---|---|---|---|
| | | Composition: Amino Lipid (502)/ | | | | |
| | | Cholesterol/DSPC/PEG-Lipid (507)/ | | | | |
| | | GalNAc-Lipid (1004) (Reference: | | | | |
| | | U.S. Pat. No. 11,207,416 B2, which | | | | |
| | | is incorporated herein by reference | | | | |
| | | in its entirety) | | | | |
| Total RNA | | | | | PDI | |
| payload | | Formu- | | % | (poly- | |
| 1:1 by wt | | lation | | Encapsu- | dispersity | |
| gRNA | mRNA | ID | Size | lation | index) | |
| GA441 | MA079 | VF1155 | 62.25 | 99.4 | 0.0280 | 2′-OMe- |
| GA441 | MA079 | VF1272 | 66.68 | 99.2 | 0.0073 | enriched |
| GA441 | MA079 | VF1313 | 71.55 | 99.5 | 0.0441 | tracer |
| GA091 | MA079 | VF1321 | 72.43 | 99.5 | 0.0573 | Minimally |
| GA675 | MA079 | VF1273 | 66.51 | 99.2 | 0.0555 | modified |
| GA677 | MA079 | VF1274 | 67.7 | 99.3 | 0.0353 | tracer |
| GA677 | MA079 | VF1312 | 72.06 | 99.5 | 0.0278 | |
| GA678 | MA079 | VF1275 | 66.32 | 99.1 | 0.0347 | |
| GA680 | MA079 | VF1280 | 66.3 | 99.4 | 0.0335 | |
| GA682 | MA079 | VF1276 | 67.67 | 99.2 | 0.0251 | |
| GA682 | MA079 | VF1314 | 71.8 | 99.5 | 0.0534 | |
| GA683 | MA079 | VF1281 | 66.08 | 99.4 | 0.0423 | |
| GA685 | MA079 | VF1282 | 64.63 | 99.5 | 0.0206 | |
| GA686 | MA079 | VF1283 | 64.3 | 99.5 | 0.0183 | |
| GA686 | MA079 | VF1315 | 71.79 | 99.4 | 0.0310 | |
| GA687 | MA079 | VF1286 | 66.52 | 99 | 0.0028 | |
| GA688 | MA079 | VF1284 | 65.15 | 99.5 | 0.0201 | |
| GA689 | MA079 | VF1288 | 65.11 | 99.5 | 0.0433 | |
| GA690 | MA079 | VF1287 | 65.76 | 99.5 | 0.0064 | |
| GA690 | MA079 | VF1316 | 73.57 | 99.4 | 0.0255 | |
| GA691 | MA079 | VF1277 | 68.04 | 99.2 | 0.0385 | |
| GA691 | MA079 | VF1317 | 76.99 | 98.1 | 0.0658 | |
| GA692 | MA079 | VF1278 | 66.03 | 99.4 | 0.0306 | |
| GA692 | MA079 | VF1318 | 76.44 | 99.1 | 0.0330 | |
| GA693 | MA079 | VF1285 | 66.07 | 99.5 | 0.0250 | |
| GA693 | MA079 | VF1319 | 72 | 99.5 | 0.0334 | |
| GA694 | MA079 | VF1279 | 67.42 | 99.2 | 0.0209 | |
| GA694 | MA079 | VF1320 | 71.88 | 99.6 | 0.0496 | |
| GA837 | MA079 | VF1542 | 64.15 | 99.05 | 0.06335 | |

[0563] The genomic DNA from PHH cells transfected with LNPs containing one of 16 sgRDNA spacer sequence variants were further tested for off-target editing. (FIG. 36B). Samples dosed with 10,000 ng/TA/mL were assessed, in addition to one of the control groups dosed with 5,000 ng/TA/mL. OT1 primer (GAO100_OT_B2) was used to measure editing percentage (A>G) in positions 1-10 of the OT1 site by Targeted Amplicon sequencing. Technical replicates were performed.

[0564] The genomic DNA from PHH cells transfected by LNP with 16 sgRDNA spacer sequence variants were further tested for off-target editing according to the protocol of SureSelect (FIG. 37 presents data from this study). The same genomic DNA samples were used for Targeted Amplicon. The input DNA was 100 ng and a panel of RNA probes of 611 candidate off-target sites derived from ONE-seq with GA441. The plot shows net editing percentage of significant sites (non-adjusted pᵥₐₗ<0.05) and is ordered by on-target potency.

[0565] FIGS. 38A & 39A provide subset of SureSelect data of top sgRDNA spacer sequence variants and the corresponding Targeted Amplicon data is in FIGS. 38B & 39B. The PHH cells in FIGS. 38A-38B were transfected by LNP and the PHH cells in FIGS. 39A-39B were transfected by MessengerMax™. These results have consistently shown that the selected spacer sequences can achieve high on-target editing but low off-target editing.

### Example 11. LNP Dose response curves for On-target and Off-target editing in PHH

[0566] LNPs were generated either by (1) microfluidic mixing using the Precision Nanosystems NanoAssemblr system according to the manufacturer's protocol, with some optimization for individual payloads or by (2) rapid inline mixing of a solution of lipid excipients in an organic solvent and an aqueous solution of gRNA and mRNA. The lipid solution generally comprises of a mixture of four formulation excipients namely: an amino lipid, a polyethylene glycol of average molecular weight 2000 Da conjugated to a lipid called PEG-Lipid, cholesterol and 1,2-distearoyl-sn-glycero-3-phosphocholine (DSPC) and GalNAc-Lipid 1004 (described in U.S. Ser. No. 11/207,416 B2, which is incorporated herein by reference in its entirety), mixed in a predetermined molar ratio in ethanol. LNP composition comprised 40-65% amino lipid, 2-20% DSPC, 1-5% PEG-Lipid, and 0.01-1% GalNAc-Lipid with the balance being cholesterol (all in mol %). The RNA aqueous solution contains a 1:1 by weight mixture of desired mRNA and guide RNA (gRNA) unless otherwise specified. The aqueous solution of desired mRNA to gRNA was then mixed with the lipid excipients in ethanol by microfluidic or by rapid inline mixing. All LNPs for reported NHP studies were prepared by following the inline mixing protocols as described in WO 2022/060871A 1 and U.S. Ser. No. 11/207,416 B2, which are incorporated herein by reference in their entirety.

[0567] Sixteen (16) different gRDNA comprising the spacer sequences with minimally modified tracrRNA were formulated with in different LNP (Table 5) and transfected at different doses to PHH cells (lot IRZ) to assess LNP dose-response. Doses included 10,000 ng/TA/mL, 5,000 ng/TA/mL, 2,500 ng/TA/mL, 1,250 ng/TA/mL, 625 ng/TA/mL, and 312.5 ng/TA/mL.

[0568] Two different batches of GalNAc-LNPs containing either 8 gRDNA spacer sequence variants with minimally modified tracrRNA or controls, (a) GA091 with minimally modified tracrRNA and (b) GA441 with 2′-OMe-enriched tracrRNA, and mRNA MA079 were formulated and transfectedin PHH cells (lot IRZ). Doses were 10,000 ng/TA/mL, 5,000 ng/TA/mL, 2,500 ng/TA/mL, 1,250 ng/TA/mL, 625 ng/TA/mL, and 312.5 ng/TA/mL. On-target primer (GA0100_OT_B1) was used to measure editing percentage (A>N) in position 6 of protospacer region in the ANGPTL3 gene by Targeted Amplicon sequencing (FIG. 40). OT1 primer (GA0100_OT_B2) and OT3 primer (GA0100_OT_B6) were used to measure off-target editing percentage (A>G) in positions 1-10 of off-target sites (FIGS. 41A-41B).

[0569] A GalNAc-LNP containing guide GA837, which is a gRDNA comprising a spacer sequence and a 2′-OMe-enriched tracrRNA, along with mRNA MA079, was formulated and transfected in PHH cells from four different donors (GNA, IRZ, LFQ, NFX). Doses were 45,000 ng/TA/mL, 30,000 ng/TA/mL, 20,000 ng/TA/mL, 13,333 ng/TA/mL, 8,889 ng/TA/mL, 4,444 ng/TA/mL, 2,222 ng/TA/mL, 1,111 ng/TA/mL, 556 ng/TA/mL, 278 ng/TA/mL, 139 ng/TA/mL and 69 ng/TA/mL. On-target primer (GA0100_OT_B1) was used to measure editing percentage (A>N) in position 6 of protospacer region in the ANGPTL3 gene by Targeted Amplicon sequencing (FIG. 42).

[0570] The evaluation of the potential for the gRDNAs to introduce structural variants (SVs) is at the nexus between off-target editing risks and genotoxicity. While karyotyping can be used to evaluate the presence of SVs and clastogenicity, it is a low-throughput, visual assay with low resolution. To confirm the absence of mutagenesis and clastogenicity with X, the Bionano Saphyr optical genome mapping (OGM) method (Bionano Genomics, 2020; Cao et al., 2014; Mak et al., 2016) was used to assess for any evidence of SVs on a genome-wide basis. OGM is a newer, imaging-based approach analogous to karyotyping but performed with greater sensitivity and at a much higher resolution, based on whole-genome coverage >1200×. The sponsor demonstrated approximately 90% detection rate of deletions at 5% VAF and of insertions at 1% VAF, using image data with >1200× effective genome coverage.

[0571] Genomic DNA from PHH cells (lot IRZ) transfected with LNP VF1542 at a dose of 20,000 ng/TA/mL was assessed for on-target editing using primer GA0100_OT_B1 (FIG. 43A). This genomic DNA was then analyzed by OGM. Total events across all SV categories (insertions, duplications, deletions, inversions, and translocations) from untreated and treated samples were summed and plotted as Circos plots. The subtraction of SVs from the treated samples that are present in the untreated control sample resulted in no remaining SVs (i.e., no SVs were generated after treatment with VF1542) (FIG. 43B).

### Example 12. On-Target and Off-Target Editing Rates in Primary Cyno Hepatocytes (PCH)

[0572] Next, hepatic ANGPTL3 editing by sgRDNA spacer sequences was measured in primary cyno hepatocytes (PCH). The results suggest that hepatic ANGPTL3 editing in LNP treated NHPs correlates with editing in PCH (FIGS. 44-45).

### Example 13. Treatment in Non-Human Primates (NHP)

[0573] Two NHP studies were conducted using LNPs constituted with two select set of spacer-modified guide nucleic acids comprising the same spacer sequences and the mRNA MA004 or MA079. The LNPs were formulated as described in Example 2. Table 6 shows the LNP formulations used for dosing in NHP (described in FIGS. 44, 46 and 47) and transfecting PCH cell lines (described in FIG. 45). Three digits after decimal point following formulation, gRNA and mRNA IDs indicate lot or batch number of the respective formulation, gRNA and mRNA.

TABLE 6
LNP Formulations

| | | | LNPs Composition: Amino Lipid (502)/ | | | | |
|---|---|---|---|---|---|---|---|
| | | | Cholesterol/DSPC/PEG-Lipid (507)/GalNAc-Lipid | | | | |
| | Total RNA | | (1004) (Reference: U.S. Pat. No. 11,207,416 B2, which | | | | |
| LNP | payload 1:1 by wt | | is incorporated herein by reference in its entirety) | | | | |
| test | Cyno | | | | % | | |
| articles | gRNA | mRNA | Formulation | Size | Encapsulation | PDI | Study |
| | GA347 | MA079 | VF1355 | 67.92 | 98.4 | 0.08996 | PCH in vitro Transfection |
| LNP 1 | GA347 | MA004 | VF1185 | 64.42 | 98.9 | 0.05933 | PCH in vitro Transfection, NHP Study 1 |
| | GA347 | MA079 | VF1365 | 70.87 | 99.0 | 0.01249 | PCH in vitro Transfection |
| LNP 1 | GA347 | MA079 | VF1371 | 64.76 | 98.9 | 0.05064 | NHP Study 2 |
| | GA748 | MA079 | VF1366 | 82.78 | 97.5 | 0.01597 | PCH in vitro Transfection |
| LNP 7 | GA748 | MA079 | VF1372 | 64.09 | 99.0 | 0.04973 | NHP Study 2 |
| | GA749 | MA079 | VF1367 | 68.27 | 99.2 | 0.02219 | PCH in vitro Transfection |
| LNP 8 | GA749 | MA079 | VF1373 | 66.40 | 99.2 | 0.04976 | NHP study 2 |
| LNP 2 | GA663 | MA004 | VF1215 | 65.40 | 99.1 | 0.0075 | PCH in vitro Transfection, NHP Study 1 |
| | GA663 | MA079 | VF1368 | 73.19 | 99.3 | 0.04705 | PCH in vitro Transfection |
| | GA663 | MA079 | VF1374 | 65.54 | 99.1 | 0.002 | PCH in vitro Transfection |
| LNP 4 | GA668 | MA004 | VF1230 | 61.18 | 99.0 | 0.072 | PCH in vitro Transfection, NHP Study 1 |
| | GA668 | MA079 | VF1369 | 69.01 | 98.9 | 0.006209 | PCH in vitro Transfection |
| LNP 4 | GA668 | MA079 | VF1375 | 63.67 | 99.4 | 0.009886 | NHP study 2 |
| | GA747 | MA079 | VF1370 | 67.61 | 99.2 | 0.0408 | PCH in vitro Transfection |
| | GA747 | MA079 | VF1376 | 68.69 | 99.1 | 0.01766 | PCH in vitro Transfection |
| LNP 3 | GA666 | MA004 | VF1219 | 63.99 | 99.1 | 0.06683 | PCH in vitro Transfection, NHP Study 1 |
| LNP 5 | GA665 | MA004 | VF1237 | 60.11 | 99.2 | 0.02243 | PCH in vitro Transfection, NHP Study 1 |
| LNP 6 | GA720 | MA004 | VF1240 | 61.03 | 99.3 | 0.01343 | PCH in vitro Transfection, NHP Study 1 |

[0574] For the first study, female cynomolgus monkeys of Cambodian origin were used as study animals. Three monkeys were dosed with LNP1 (GA347), 3 monkeys were dosed with LNP2 (GA663), 3 monkeys were dosed with LNP3 (GA666), 3 monkeys with LNP4 (GA668), 3 monkeys with LNP5 (GA665) and 3 monkeys with LNP6 (GA720) on day 1 of the study via a single IV infusion at a dose level of 2 mg of combined sgRNA and mRNA per kg of animal body weight and at a dose volume of 6 mL/kg (n=3/group). Blood samples were collected from all animals predose for baseline measurement and post-dose at various time points on days 1 through 15 to assess biomarkers and serum safety parameters. Necropsies were performed on all animals at day 16. Liver biopsy samples were collected to assess ANGPTL3 gene editing.

[0575] For second the study, female cynomolgus monkeys of Cambodian origin were used as study animals. Three monkeys were dosed with LNP1 (GA347) at a dose level of 2 mg/kg, 2 groups of monkeys (n=3/group) were dosed with LNP7 (GA748) at a dose level of 2 mg/kg or a dose level of 4 mg/kg, 3 monkeys with LNP4 (GA668), and 3 groups of monkeys with LNP8 (GA749) at a dose level of 2, 3, and 4 mg/kg respectively. All LNPs were administered via a single IV infusion on day 1 of the study at the indicated dose level of combined sgRNA and mRNA per kg of animal body weight and at a dose volume of 6 mL/kg. Blood samples were collected from all animals predose for baseline measurement and post-dose at various time points on days 1 through 15 to assess biomarkers and serum safety parameters. Necropsies were performed on all animals at day 16. Liver biopsy samples were collected to assess ANGPTL3 gene editing.

[0576] The extent of gene editing in the liver was evaluated by next-generation sequencing (NGS) of targeted polymerase chain reaction (PCR) amplicons (Targeted Amplicon sequencing) at the ANGPTL3 target site, using species-specific primer cAN_Ex6_3_NEXT_F1, derived from genomic DNA extracted from the liver of the animal using the method described previously (Musunuru et al, Nature 593, no. 7859 (May 2021): 429-34. https://doi.org/10.1038/s41586-021-03534-y). Percent editing was reported as the percent of all reads containing a nonreference allele at the target adenine.

[0577] Serum was collected from all animals on days −10, −7, −5 pre-infusion and days 8 and 15 post LNP infusion for ANGPTL3 protein analysis. ANGPTL3 protein levels were quantified using an ANGPTL3 sandwich ELISA with the data obtained from the analysis of Day 15 samples presented in FIG. 47. Values for day −10, −7, and −5 were averaged to obtain the baseline value.

[0578] The results in NHP Cynomolgus monkeys show that the guide nucleic acid sequences comprising the spacer sequences disclosed herein were able to achieve >54% editing (A>N) at position 6 in the protospacer region of the ANGPL3 gene by Targeted Amplicon sequencing in liver 15 days post injection (FIG. 46). There was >90% reduction in plasma ANGPTL3 protein compared to baseline, 15 days post injection. (FIG. 47).

[0579] The spacer sequences and the guide nucleic acid sequences comprising the spacer sequences targeting human ANGPTL3 gene as well as the corresponding sequences targeting cyno ANGPTL3 gene are provided in Table 7.

TABLE 7
Guide RNA (gRDNA) and Spacer Sequence Pairs Targeting ANGPTL3 gene

| | | | SEQ | | SEQ |
|---|---|---|---|---|---|
| | gRDNA | Spacer | ID | | ID |
| Species | ID | Sequence | NO | gRDNA Sequence | NO |
| Human | GA091 | asasg | 5 | asasgsAUACCUGAAUAACCCUCGUUUUAGAG | 69 |
| (1) | | sAUAC | | CUAGAAAUAGCAAGUUAAAAUAAGGCUAG | |
| | | CUGA | | UCCGUUAUCAACUUGAAAAAGUGGCACCG | |
| | | AUAA | | AGUCGGUGCUsususu | |
| | | CCCU | | | |
| | | C | | | |
| | GA441 | | | asasgsAUACCUGAAUAACCCUCgUUUUAGagcu | 70 |
| | | | | aGaaauagcaaGUUaAaAuAaggcuaGUccGUUAucA | |
| | | | | AcuuGaaaaagugGcaccgagucggugcusususu | |
| Monkey | N/A | asasg | 6 | N/A | |
| (1) | | sAUAC | | | |
| | | CUGA | | | |
| | | AUAA | | | |
| | | CUCU | | | |
| | | C | | | |
| | GA347 | | | asasgsAUACCUGAAUAACUCUCgUUUUAGagc | 71 |
| | | | | uaGaaauagcaaGUUaAaAuAaggcuaGUccGUUAucA | |
| | | | | AcuuGaaaaagugGcaccgagucggugcusususu | |
| Human | GA680 | asasg | 7 | asasgsAUAdCCdUGAAdUAACCCUCGUUUUAG | 72 |
| (2) | | sAUAd | | AGCUAGAAAUAGCAAGUUAAAAUAAGGCU | |
| | | CCdU | | AGUCCGUUAUCAACUUGAAAAAGUGGCAC | |
| | | GAAd | | CGAGUCGGUGCUsususu | |
| | | UAAC | | | |
| | | CCUC | | | |
| Monkey | GA765 | asasgs | 8 | asasgsAUAdCCdUGAAdUAACUCUCGUUUUAG | 73 |
| (2) | | AUAd | | AGCUAGAAAUAGCAAGUUAAAAUAAGGCU | |
| | | CCdU | | AGUCCGUUAUCAACUUGAAAAAGUGGCAC | |
| | | GAAd | | CGAGUCGGUGCUsususu | |
| | | UAAC | | | |
| | | UCUC | | | |
| | GA668 | | | asasgsAUAdCCdUGAAdUAACUCUCgUUUUAG | 74 |
| | | | | agcuaGaaauagcaaGUUaAaAuAaggcuaGUccGUUA | |
| | | | | ucAAcuuGaaaaagugGcaccgagucggugcusususu | |
| Human | GA675 | asdAsg | 9 | asdAsgsadUdAdCdCdUdGdAAUdAAdCdCdCUCG | 75 |
| (3) | | sadUd | | UUUUAGAGCUAGAAAUAGCAAGUUAAAAU | |
| | | AdCdC | | AAGGCUAGUCCGUUAUCAACUUGAAAAAG | |
| | | dUdGd | | UGGCACCGAGUCGGUGCUsususu | |
| | | AAUd | | | |
| | | AAdCd | | | |
| | | CdCUC | | | |
| | GA722 | | | asdAsgsadUdAdCdCdUdGdAAUdAAdCdCdCUCg | 76 |
| | | | | UUUUAGagcuaGaaauagcaaGUUaAaAuAaggcuaG | |
| | | | | UccGUUAucAAcuuGaaaaagugGcaccgagucggugcus | |
| | | | | ususu | |
| Monkey | GA762 | asdAsg | 10 | asdAsgsadUdAdCdCdUdGdAAUdAAdCdUdCUC | 77 |
| (3) | | sadUd | | GUUUUAGAGCUAGAAAUAGCAAGUUAAAA | |
| | | AdCdC | | UAAGGCUAGUCCGUUAUCAACUUGAAAAA | |
| | | dUdGd | | GUGGCACCGAGUCGGUGCUsususu | |
| | | AAUd | | | |
| | | AAdCd | | | |
| | | UdCU | | | |
| | | C | | | |
| | GA663 | | | asdAsgsadUdAdCdCdUdGdAAUdAAdCdUdCUCg | 78 |
| | | | | UUUUAGagcuaGaaauagcaaGUUaAaAuAaggcuaG | |
| | | | | UccGUUAucAAcuuGaaaaagugGcaccgagucggugcus | |
| | | | | ususu | |
| Human | GA682 | asasdG | 11 | asasdGsdAdUdAdCCUGAAUAACCCUCGUUUU | 79 |
| (4) | | sdAdU | | AGAGCUAGAAAUAGCAAGUUAAAAUAAGG | |
| | | dAdCC | | CUAGUCCGUUAUCAACUUGAAAAAGUGGC | |
| | | UGAA | | ACCGAGUCGGUGCUsususu | |
| | | UAAC | | | |
| | | CCUC | | | |
| | GA723 | | | asasdGsdAdUdAdCCUGAAUAACCCUCgUUUU | 80 |
| | | | | AGagcuaGaaauagcaaGUUaAaAuAaggcuaGUccGU | |
| | | | | UAucAAcuuGaaaaagugGcaccgagucggugcusususu | |
| Monkey | GA755 | asasdG | 12 | asasdGsdAdUdAdCCUGAAUAACUCUCGUUUU | 81 |
| (4) | | sdAdU | | AGAGCUAGAAAUAGCAAGUUAAAAUAAGG | |
| | | dAdCC | | CUAGUCCGUUAUCAACUUGAAAAAGUGGC | |
| | | UGAA | | ACCGAGUCGGUGCUsususu | |
| | | UAAC | | | |
| | | UCUC | | | |
| | GA746 | | | asasdGsdAdUdAdCCUGAAUAACUCUCgUUUU | 82 |
| | | | | AGagcuaGaaauagcaaGUUaAaAuAaggcuaGUccGU | |
| | | | | UAucAAcuuGaaaaagugGcaccgagucggugcusususu | |
| Human | GA683 | dAsdAs | 13 | dAsdAsgsadUdAdCdCdUdGdAAUdAAdCdCdCU | 83 |
| (5) | | gsadUd | | CGUUUUAGAGCUAGAAAUAGCAAGUUAAA | |
| | | AdCdC | | AUAAGGCUAGUCCGUUAUCAACUUGAAAA | |
| | | dUdGd | | AGUGGCACCGAGUCGGUGCUsususu | |
| | | AAUd | | | |
| | | AAdCd | | | |
| | | CdCUC | | | |
| | GA635 | | | dAsdAsgsadUdAdCdCdUdGdAAUdAAdCdCdCU | 84 |
| | | | | CgUUUUAGagcuaGaaauagcaaGUUaAaAuAaggcua | |
| | | | | GUccGUUAucAAcuuGaaaaagugGcaccgagucggugc | |
| | | | | usususu | |
| Monkey | GA766 | dAsdAs | 14 | dAsdAsgsadUdAdCdCdUdGdAAUdAAdCdUdCU | 85 |
| (5) | | gsadUd | | CGUUUUAGAGCUAGAAAUAGCAAGUUAAA | |
| | | AdCdC | | AUAAGGCUAGUCCGUUAUCAACUUGAAAA | |
| | | dUdGd | | AGUGGCACCGAGUCGGUGCUsususu | |
| | | AAUd | | | |
| | | AAdCd | | | |
| | | UdC | | | |
| Human | GA678 | asdAsd | 15 | asdAsdGsdAdTdAdCdCdTdGAAUAACCCUCGU | 86 |
| (6) | | GsdAd | | UUUAGAGCUAGAAAUAGCAAGUUAAAAUA | |
| | | UdAdC | | AGGCUAGUCCGUUAUCAACUUGAAAAAGU | |
| | | dCdUd | | GGCACCGAGUCGGUGCUsususu | |
| | | GAAU | | | |
| | | AACC | | | |
| | | CUC | | | |
| Monkey | GA764 | asdAsd | 16 | asdAsdGsdAdTdAdCdCdTdGAAUAACUCUCGU | 87 |
| (6) | | GsdAd | | UUUAGAGCUAGAAAUAGCAAGUUAAAAUA | |
| | | UdAdC | | AGGCUAGUCCGUUAUCAACUUGAAAAAGU | |
| | | dCdUd | | GGCACCGAGUCGGUGCUsususu | |
| | | GAAU | | | |
| | | AACU | | | |
| | | CUC | | | |
| | GA666 | | | asdAsdGsdAdTdAdCdCdTdGAAUAACUCUCgU | 88 |
| | | | | UUUAGagcuaGaaauagcaaGUUaAaAuAaggcuaGUc | |
| | | | | cGUUAucAAcuuGaaaaagugGcaccgagucggugcususu | |
| | | | | su | |
| Human | GA677 | asasdG | 17 | asasdGsdAdUdACdCUdGAdAUdAAdCCdCUdCG | 89 |
| (7) | | sdAdU | | UUUUAGAGCUAGAAAUAGCAAGUUAAAAU | |
| | | dACdC | | AAGGCUAGUCCGUUAUCAACUUGAAAAAG | |
| | | UdGAd | | UGGCACCGAGUCGGUGCUsususu | |
| | | AUdA | | | |
| | | AdCCd | | | |
| | | CUdC | | | |
| | GA629 | | | asasdGsdAdUdACdCUdGAdAUdAAdCCdCUdCg | 90 |
| | | | | UUUUAGagcuaGaaauagcaaGUUaAaAuAaggcuaG | |
| | | | | UccGUUAucAAcuuGaaaaagugGcaccgagucggugcus | |
| | | | | ususu | |
| Monkey | GA763 | asasdG | 18 | asasdGsdAdUdACdCUdGAdAUdAAdCUdCUdCG | 91 |
| (7) | | sdAdU | | UUUUAGAGCUAGAAAUAGCAAGUUAAAAU | |
| | | dACdC | | AAGGCUAGUCCGUUAUCAACUUGAAAAAG | |
| | | UdGAd | | UGGCACCGAGUCGGUGCUsususu | |
| | | AUdA | | | |
| | | AdCUd | | | |
| | | CUdC | | | |
| | GA665 | | | asasdGsdAdUdACdCUdGAdAUdAAdCUdCUdCg | 92 |
| | | | | UUUUAGagcuaGaaauagcaaGUUaAaAuAaggcuaG | |
| | | | | UccGUUAucAAcuuGaaaaagugGcaccgagucggugcus | |
| | | | | ususu | |
| Human | GA676 | asasdG | 19 | asasdGsdAdUdAdCdCdUdGAdAUdAAdCCdCUdC | 93 |
| (8) | | sdAdU | | GUUUUAGAGCUAGAAAUAGCAAGUUAAAA | |
| | | dAdCd | | UAAGGCUAGUCCGUUAUCAACUUGAAAAA | |
| | | CdUdG | | GUGGCACCGAGUCGGUGCUsususu | |
| | | AdAUd | | | |
| | | AAdC | | | |
| | | CdCUd | | | |
| | | C | | | |
| | GA630 | | | asasdGsdAdUdAdCdCdUdGAdAUdAAdCCdCUdC | 94 |
| | | | | gUUUUAGagcuaGaaauagcaaGUUaAaAuAaggcua | |
| | | | | GUccGUUAucAAcuuGaaaaagugGcaccgagucggugc | |
| | | | | usususu | |
| Monkey | GA664 | asasdG | 20 | asasdGsdAdUdAdCdCdUdGAdAUdAAdCUdCUd | 95 |
| (8) | | sdAdU | | CgUUUUAGagcuaGaaauagcaaGUUaAaAuAaggcua | |
| | | dAdCd | | GUccGUUAucAAcuuGaaaaagugGcaccgagucggugc | |
| | | CdUdG | | usususu | |
| | | AdAUd | | | |
| | | AAdC | | | |
| | | UdCUd | | | |
| | | C | | | |
| Human | GA679 | dAsdAs | 21 | dAsdAsdGsdAdUdACdCdUdGdAAUAACCCUCG | 96 |
| (9) | | dGsdA | | UUUUAGAGCUAGAAAUAGCAAGUUAAAAU | |
| | | dUdAC | | AAGGCUAGUCCGUUAUCAACUUGAAAAAG | |
| | | dCdUd | | UGGCACCGAGUCGGUGCUsususu | |
| | | GdAA | | | |
| | | UAAC | | | |
| | | CCUC | | | |
| Monkey | GA667 | dAsdAs | 22 | dAsdAsdGsdAdUdACdCdUdGdAAUAACUCUCg | 97 |
| (9) | | dGsdA | | UUUUAGagcuaGaaauagcaaGUUaAaAuAaggcuaG | |
| | | dUdAC | | UccGUUAucAAcuuGaaaaagugGcaccgagucggugcus | |
| | | dCdUd | | ususu | |
| | | GdAA | | | |
| | | UAAC | | | |
| | | UCUC | | | |
| Human | GA681 | asdAsd | 23 | asdAsdGsdAdUdAdCdCdUdGAdAUdAAdCCdCU | 98 |
| (10) | | GsdAd | | dCGUUUUAGAGCUAGAAAUAGCAAGUUAA | |
| | | UdAdC | | AAUAAGGCUAGUCCGUUAUCAACUUGAAA | |
| | | dCdUd | | AAGUGGCACCGAGUCGGUGCUsususu | |
| | | GAdA | | | |
| | | UdAAd | | | |
| | | CcdCU | | | |
| | | dC | | | |
| | GA669 | asdAsd | 24 | asdAsdGsdAdUdAdCdCdUdGAdAUdAAdCUdCU | 99 |
| | | GsdAd | | dCgUUUUAGagcuaGaaauagcaaGUUaAaAuAaggc | |
| | | UdAdC | | uaGUccGUUAucAAcuuGaaaaagugGcaccgagucggu | |
| | | dCdUd | | gcusususu | |
| | | GAdA | | | |
| | | UdAAd | | | |
| | | CUdC | | | |
| | | UdC | | | |
| Human | GA684 | asasdG | 25 | asasdGsdAdUdAdCdCUGAAUAACCCUCGUUU | 100 |
| (11) | | sdAdU | | UAGAGCUAGAAAUAGCAAGUUAAAAUAAG | |
| | | dAdCd | | GCUAGUCCGUUAUCAACUUGAAAAAGUGG | |
| | | CUGA | | CACCGAGUCGGUGCUsususu | |
| | | AUAA | | | |
| | | CCCU | | | |
| | | C | | | |
| | GA636 | | | asasdGsdAdUdAdCdCUGAAUAACCCUCgUUUU | 101 |
| | | | | AGagcuaGaaauagcaaGUUaAaAuAaggcuaGUccGU | |
| | | | | UAucAAcuuGaaaaagugGcaccgagucggugcusususu | |
| Human | GA691 | asasgsd | 26 | asasgsdAdUdAdCCdUdGAAdUdAACCCUCGUU | 102 |
| (12) | | AdUdA | | UUAGAGCUAGAAAUAGCAAGUUAAAAUAA | |
| | | dCCdU | | GGCUAGUCCGUUAUCAACUUGAAAAAGUG | |
| | | dGAAd | | GCACCGAGUCGGUGCUsususu | |
| | | UdAA | | | |
| | | CCCU | | | |
| | | C | | | |
| | GA724 | | | asasgsdAdUdAdCCdUdGAAdUdAACCCUCgUUU | 103 |
| | | | | UAGagcuaGaaauagcaaGUUaAaAuAaggcuaGUccG | |
| | | | | UUAucAAcuuGaaaaagugGcaccgagucggugcusususu | |
| Monkey | GA757 | asasgsd | 27 | asasgsdAdUdAdCCdUdGAAdUdAACUCUCGUU | 104 |
| (12) | | AdUdA | | UUAGAGCUAGAAAUAGCAAGUUAAAAUAA | |
| | | dCCdU | | GGCUAGUCCGUUAUCAACUUGAAAAAGUG | |
| | | dGAAd | | GCACCGAGUCGGUGCUsususu | |
| | | UdAA | | | |
| | | CUCU | | | |
| | | C | | | |
| | GA747 | | | asasgsdAdUdAdCCdUdGAAdUdAACUCUCgUUU | 105 |
| | | | | UAGagcuaGaaauagcaaGUUaAaAuAaggcuaGUccG | |
| | | | | UUAucAAcuuGaaaaagugGcaccgagucggugcusususu | |
| Human | GA692 | asasdG | 28 | asasdGsdAUdAdCCUGAAUAACCCUCGUUUUA | 106 |
| (13) | | sdAUd | | GAGCUAGAAAUAGCAAGUUAAAAUAAGGC | |
| | | AdCC | | UAGUCCGUUAUCAACUUGAAAAAGUGGCA | |
| | | UGAA | | CCGAGUCGGUGCUsususu | |
| | | UAAC | | | |
| | | CCUC | | | |
| | GA745 | | | asasdGsdAUdAdCCUGAAUAACCCUCgUUUUA | 107 |
| | | | | GagcuaGaaauagcaaGUUaAaAuAaggcuaGUccGUU | |
| | | | | AucAAcuuGaaaaagugGcaccgagucggugcusususu | |
| Monkey | GA758 | asasdG | 29 | asasdGsdAUdAdCCUGAAUAACUCUCGUUUUA | 108 |
| (13) | | sdAUd | | GAGCUAGAAAUAGCAAGUUAAAAUAAGGC | |
| | | AdCC | | UAGUCCGUUAUCAACUUGAAAAAGUGGCA | |
| | | UGAA | | CCGAGUCGGUGCUsususu | |
| | | UAAC | | | |
| | | UCUC | | | |
| | GA748 | | | asasdGsdAUdAdCCUGAAUAACUCUCgUUUUA | 109 |
| | | | | GagcuaGaaauagcaaGUUaAaAuAaggcuaGUccGUU | |
| | | | | AucAAcuuGaaaaagugGcaccgagucggugcusususu | |
| Human | GA693 | asasdG | 30 | asasdGsdAUdAdCdCUGAAUAACCCUCGUUUU | 110 |
| (14) | | sdAUd | | AGAGCUAGAAAUAGCAAGUUAAAAUAAGG | |
| | | AdCdC | | CUAGUCCGUUAUCAACUUGAAAAAGUGGC | |
| | | UGAA | | ACCGAGUCGGUGCUsususu | |
| | | UAAC | | | |
| | | CCUC | | | |
| | GA837 | | | asasdGsdAUdAdCdCUGAAUAACCCUCgUUUU | 111 |
| | | | | AGagcuaGaaauagcaaGUUaAaAuAaggcuaGUccGU | |
| | | | | UAucAAcuuGaaaaagugGcaccgagucggugcusususu | |
| Monkey | GA759 | asasdG | 31 | asasdGsdAUdAdCdCUGAAUAACUCUCGUUUU | 112 |
| (14) | | sdAUd | | AGAGCUAGAAAUAGCAAGUUAAAAUAAGG | |
| | | AdCdC | | CUAGUCCGUUAUCAACUUGAAAAAGUGGC | |
| | | UGAA | | ACCGAGUCGGUGCUsususu | |
| | | UAAC | | | |
| | | UCUC | | | |
| | GA749 | | | asasdGsdAUdAdCdCUGAAUAACUCUCgUUUU | 113 |
| | | | | AGagcuaGaaauagcaaGUUaAaAuAaggcuaGUccGU | |
| | | | | UAucAAcuuGaaaaagugGcaccgagucggugcusususu | |
| Human | GA690 | asasgs | 32 | asasgsAUACCUdGAAdUAACCdCUCGUUUUAG | 114 |
| (15) | | AUAC | | AGCUAGAAAUAGCAAGUUAAAAUAAGGCU | |
| | | CUdG | | AGUCCGUUAUCAACUUGAAAAAGUGGCAC | |
| | | AAdU | | CGAGUCGGUGCUsususu | |
| | | AACC | | | |
| | | dCUC | | | |
| | GA642 | | | asasgsAUACCUdGAAdUAACCdCUCgUUUUAG | 115 |
| | | | | agcuaGaaauagcaaGUUaAaAuAaggcuaGUccGUUA | |
| | | | | ucAAcuuGaaaaagugGcaccgagucggugcusususu | |
| Human | GA689 | asasgs | 33 | asasgsAUdACCUGAAUAAdCCCUCGUUUUAG | 116 |
| (16) | | AUdA | | AGCUAGAAAUAGCAAGUUAAAAUAAGGCU | |
| | | CCUG | | AGUCCGUUAUCAACUUGAAAAAGUGGCAC | |
| | | AAUA | | CGAGUCGGUGCUsususu | |
| | | AdCCC | | | |
| | | UC | | | |
| | GA641 | | | asasgsAUdACCUGAAUAAdCCCUCgUUUUAGa | 117 |
| | | | | gcuaGaaauagcaaGUUaAaAuAaggcuaGUccGUUAu | |
| | | | | cAAcuuGaaaaagugGcaccgagucggugcusususu | |
| Monkey | GA770 | asasgs | 34 | asasgsAUdACCUGAAUAAdCUCUCGUUUUAG | 118 |
| (16) | | AUdA | | AGCUAGAAAUAGCAAGUUAAAAUAAGGCU | |
| | | CCUG | | AGUCCGUUAUCAACUUGAAAAAGUGGCAC | |
| | | AAUA | | CGAGUCGGUGCUsususu | |
| | | AdCU | | | |
| | | CUC | | | |
| | GA0746 | | | asasgsAUdACCUGAAUAAdCUCUCgUUUUAGa | 119 |
| | | | | gcuaGaaauagcaaGUUaAaAuAaggcuaGUccGUUAu | |
| | | | | cAAcuuGaaaaagugGcaccgagucggugcusususu | |
| Human | GA685 | asasgs | 35 | asasgs AdUAdCCdUGdAAdUAdACdCCdUCGUU | 120 |
| (17) | | AdUAd | | UUAGAGCUAGAAAUAGCAAGUUAAAAUAA | |
| | | CCdU | | GGCUAGUCCGUUAUCAACUUGAAAAAGUG | |
| | | GdAAd | | GCACCGAGUCGGUGCUsususu | |
| | | UAdA | | | |
| | | CdCCd | | | |
| | | UC | | | |
| | GA627 | | | asasgsAdUAdCCdUGdAAdUAdACdCCdUCgUUU | 121 |
| | | | | UAGagcuaGaaauagcaaGUUaAaAuAaggcuaGUccG | |
| | | | | UUAucAAcuuGaaaaagugGcaccgagucggugcusususu | |
| Monkey | GA767 | asasgs | 36 | asasgsAdUAdCCdUGdAAdUAdACdUCdUCGUU | 122 |
| (17) | | AdUAd | | UUAGAGCUAGAAAUAGCAAGUUAAAAUAA | |
| | | CCdU | | GGCUAGUCCGUUAUCAACUUGAAAAAGUG | |
| | | GdAAd | | GCACCGAGUCGGUGCUsususu | |
| | | UAdA | | | |
| | | CdUCd | | | |
| | | UC | | | |
| | GA0709 | | | asasgsAdUAdCCdUGdAAdUAdACdUCdUCgUUU | 123 |
| | | | | UAGagcuaGaaauagcaaGUUaAaAuAaggcuaGUccG | |
| | | | | UUAucAAcuuGaaaaagugGcaccgagucggugcusususu | |
| Human | GA687 | asasgsd | 37 | asasgsdAdUdAdCdCdUdGAAUAACCCUCGUUU | 124 |
| (18) | | AdUdA | | UAGAGCUAGAAAUAGCAAGUUAAAAUAAG | |
| | | dCdCd | | GCUAGUCCGUUAUCAACUUGAAAAAGUGG | |
| | | UdGA | | CACCGAGUCGGUGCUsususu | |
| | | AUAA | | | |
| | | CCCU | | | |
| | | C | | | |
| | GA639 | | | asasgsdAdUdAdCdCdUdGAAUAACCCUCgUUU | 125 |
| | | | | UAGagcuaGaaauagcaaGUUaAaAuAaggcuaGUccG | |
| | | | | UUAucAAcuuGaaaaagugGcaccgagucggugcusususu | |
| Monkey | GA768 | asasgsd | 38 | asasgsdAdUdAdCdCdUdGAAUAACUCUCGUUU | 126 |
| (18) | | AdUdA | | UAGAGCUAGAAAUAGCAAGUUAAAAUAAG | |
| | | dCdCd | | GCUAGUCCGUUAUCAACUUGAAAAAGUGG | |
| | | UdGA | | CACCGAGUCGGUGCUsususu | |
| | | AUAA | | | |
| | | CUCU | | | |
| | | C | | | |
| | GA0664 | | | asasgsdAdUdAdCdCdUdGAAUAACUCUCgUUU | 127 |
| | | | | UAGagcuaGaaauagcaaGUUaAaAuAaggcuaGUccG | |
| | | | | UUAucAAcuuGaaaaagugGcaccgagucggugcusususu | |
| Human | GA686 | asasdG | 39 | asasdGsdAdUdAdCdCdUGAAUAACCCUCGUUU | 128 |
| (19) | | sdAdU | | UAGAGCUAGAAAUAGCAAGUUAAAAUAAG | |
| | | dAdCd | | GCUAGUCCGUUAUCAACUUGAAAAAGUGG | |
| | | CdUG | | CACCGAGUCGGUGCUsususu | |
| | | AAUA | | | |
| | | ACCC | | | |
| | | UC | | | |
| | GA638 | | | asasdGsdAdUdAdCdCdUGAAUAACCCUCgUUU | 129 |
| | | | | UAGagcuaGaaauagcaaGUUaAaAuAaggcuaGUccG | |
| | | | | UUAucAAcuuGaaaaagugGcaccgagucggugcusususu | |
| Monkey | GA760 | asasdG | 40 | asasdGsdAdUdAdCdCdUGAAUAACUCUCGUUU | 130 |
| (19) | | sdAdU | | UAGAGCUAGAAAUAGCAAGUUAAAAUAAG | |
| | | dAdCd | | GCUAGUCCGUUAUCAACUUGAAAAAGUGG | |
| | | CdUG | | CACCGAGUCGGUGCUsususu | |
| | | AAUA | | | |
| | | ACUC | | | |
| | | UC | | | |
| | GA750 | | | asasdGsdAdUdAdCdCdUGAAUAACUCUCgUUU | 131 |
| | | | | UAGagcuaGaaauagcaaGUUaAaAuAaggcuaGUccG | |
| | | | | UUAucAAcuuGaaaaagugGcaccgagucggugcusususu | |
| Human | GA694 | asasdG | 41 | asasdGsdAUdAdCdCdUGAAUAACCCUCGUUU | 132 |
| (20) | | sdAUd | | UAGAGCUAGAAAUAGCAAGUUAAAAUAAG | |
| | | AdCdC | | GCUAGUCCGUUAUCAACUUGAAAAAGUGG | |
| | | dUGA | | CACCGAGUCGGUGCUsususu | |
| | | AUAA | | | |
| | | CCCU | | | |
| | | C | | | |
| | GA646 | | | asasdGsdAUdAdCdCdUGAAUAACCCUCgUUUU | 133 |
| | | | | AGagcuaGaaauagcaaGUUaAaAuAaggcuaGUccGU | |
| | | | | UAucAAcuuGaaaaagugGcaccgagucggugcusususu | |
| Monkey | GA761 | asasdG | 42 | asasdGsdAUdAdCdCdUGAAUAACUCUCGUUU | 134 |
| (20) | | sdAUd | | UAGAGCUAGAAAUAGCAAGUUAAAAUAAG | |
| | | AdCdC | | GCUAGUCCGUUAUCAACUUGAAAAAGUGG | |
| | | dUGA | | CACCGAGUCGGUGCUsususu | |
| | | AUAA | | | |
| | | CUCU | | | |
| | | C | | | |
| | GA751 | | | asasdGsdAUdAdCdCdUGAAUAACUCUCgUUUU | 135 |
| | | | | AGagcuaGaaauagcaaGUUaAaAuAaggcuaGUccGU | |
| | | | | UAucAAcuuGaaaaagugGcaccgagucggugcusususu | |
| Human | GA688 | asasdG | 43 | asasdGsdAdUdAdCdCdUdGAAUAACCCUCGUU | 136 |
| (21) | | sdAdU | | UUAGAGCUAGAAAUAGCAAGUUAAAAUAA | |
| | | dAdCd | | GGCUAGUCCGUUAUCAACUUGAAAAAGUG | |
| | | CdUdG | | GCACCGAGUCGGUGCUsususu | |
| | | AAUA | | | |
| | | ACCC | | | |
| | | UC | | | |
| | GA640 | | | asasdGsdAdUdAdCdCdUdGAAUAACCCUCgUU | 137 |
| | | | | UUAGagcuaGaaauagcaaGUUaAaAuAaggcuaGUcc | |
| | | | | GUUAucAAcuuGaaaaagugGcaccgagucggugcususus | |
| | | | | u | |
| Monkey | GA769 | asasdG | 44 | asasdGsdAdUdAdCdCdUdGAAUAACUCUCGUU | 138 |
| (21) | | sdAdU | | UUAGAGCUAGAAAUAGCAAGUUAAAAUAA | |
| | | dAdCd | | GGCUAGUCCGUUAUCAACUUGAAAAAGUG | |
| | | CdUdG | | GCACCGAGUCGGUGCUsususu | |
| | | AAUA | | | |
| | | ACUC | | | |
| | | UC | | | |
| | GA0665 | | | asasdGsdAdUdAdCdCdUdGAAUAACUCUCgUU | 139 |
| | | | | UUAGagcuaGaaauagcaaGUUaAaAuAaggcuaGUcc | |
| | | | | GUUAucAAcuuGaaaaagugGcaccgagucggugcususus | |
| | | | | u | |
| Human | GA695 | asasdG | 45 | asasdGsdAUdAdCdCdUdGAAUAACCCUCGUUU | 140 |
| (22) | | sdAUd | | UAGAGCUAGAAAUAGCAAGUUAAAAUAAG | |
| | | AdCdC | | GCUAGUCCGUUAUCAACUUGAAAAAGUGG | |
| | | dUdGA | | CACCGAGUCGGUGCUsususu | |
| | | AUAA | | | |
| | | CCCU | | | |
| | | C | | | |
| | GA647 | | | asasdGsdAUdAdCdCdUdGAAUAACCCUCgUUU | 141 |
| | | | | UAGagcuaGaaauagcaaGUUaAaAuAaggcuaGUccG | |
| | | | | UUAucAAcuuGaaaaagugGcaccgagucggugcusususu | |
| Human | GA696 | asasdG | 46 | asasdGsdAUAdCdCdUGAAUAACCCUCGUUUU | 142 |
| (23) | | sdAUA | | AGAGCUAGAAAUAGCAAGUUAAAAUAAGG | |
| | | dCdCd | | CUAGUCCGUUAUCAACUUGAAAAAGUGGC | |
| | | UGAA | | ACCGAGUCGGUGCUsususu | |
| | | UAAC | | | |
| | | CCUC | | | |
| | GA648 | | | asasdGsdAUAdCdCdUGAAUAACCCUCgUUUU | 143 |
| | | | | AGagcuaGaaauagcaaGUUaAaAuAaggcuaGUccGU | |
| | | | | UAucAAcuuGaaaaagugGcaccgagucggugcusususu | |
| Human | GA697 | asasdG | 47 | asasdGsdAUAdCdCdUdGAAUAACCCUCGUUU | 144 |
| (24) | | sdAUA | | UAGAGCUAGAAAUAGCAAGUUAAAAUAAG | |
| | | dCdCd | | GCUAGUCCGUUAUCAACUUGAAAAAGUGG | |
| | | UdGA | | CACCGAGUCGGUGCUsususu | |
| | | AUAA | | | |
| | | CCCU | | | |
| | | C | | | |
| | GA649 | | | asasdGsdAUAdCdCdUdGAAUAACCCUCgUUUU | 145 |
| | | | | AGagcuaGaaauagcaaGUUaAaAuAaggcuaGUccGU | |
| | | | | UAucAAcuuGaaaaagugGcaccgagucggugcusususu | |
| Human | GA698 | asasdG | 48 | asasdGsAdUAdCCdUGAAUAACCCUCGUUUUA | 146 |
| (25) | | sAdUA | | GAGCUAGAAAUAGCAAGUUAAAAUAAGGC | |
| | | dCCdU | | UAGUCCGUUAUCAACUUGAAAAAGUGGCA | |
| | | GAAU | | CCGAGUCGGUGCUsususu | |
| | | AACC | | | |
| | | CUC | | | |
| | GA650 | | | asasdGsAdUAdCCdUGAAUAACCCUCgUUUUA | 147 |
| | | | | GagcuaGaaauagcaaGUUaAaAuAaggcuaGUccGUU | |
| | | | | AucAAcuuGaaaaagugGcaccgagucggugcusususu | |
| Human | GA699 | asasgsd | 49 | asasgsdAUdACdCUdGAAUAACCCUCGUUUUA | 148 |
| (26) | | AUdA | | GAGCUAGAAAUAGCAAGUUAAAAUAAGGC | |
| | | CdCUd | | UAGUCCGUUAUCAACUUGAAAAAGUGGCA | |
| | | GAAU | | CCGAGUCGGUGCUsususu | |
| | | AACC | | | |
| | | CUC | | | |
| | GA651 | | | asasgsdAUdACdCUdGAAUAACCCUCgUUUUA | 149 |
| | | | | GagcuaGaaauagcaaGUUaAaAuAaggcuaGUccGUU | |
| | | | | AucAAcuuGaaaaagugGcaccgagucggugcusususu | |
| Human | GA700 | asasgs | 50 | asasgsAUACCdUGAAdUAACCCUCGUUUUAG | 150 |
| (27) | | AUAC | | AGCUAGAAAUAGCAAGUUAAAAUAAGGCU | |
| | | CdUG | | AGUCCGUUAUCAACUUGAAAAAGUGGCAC | |
| | | AAdU | | CGAGUCGGUGCUsususu | |
| | | AACC | | | |
| | | CUC | | | |
| | GA652 | | | asasgsAUACCdUGAAdUAACCCUCgUUUUAGa | 151 |
| | | | | gcuaGaaauagcaaGUUaAaAuAaggcuaGUccGUUAu | |
| | | | | cAAcuuGaaaaagugGcaccgagucggugcusususu | |
| Human | GA701 | asasgsd | 51 | asasgsdAUdACdCUdGAdAUdAAdCCdCUdCGUU | 152 |
| (28) | | AUdA | | UUAGAGCUAGAAAUAGCAAGUUAAAAUAA | |
| | | CdCUd | | GGCUAGUCCGUUAUCAACUUGAAAAAGUG | |
| | | GAdA | | GCACCGAGUCGGUGCUsususu | |
| | | UdAAd | | | |
| | | CCdCU | | | |
| | | dC | | | |
| | GA628 | | | asasgsdAUdACdCUdGAdAUdAAdCCdCUdCgUU | 153 |
| | | | | UUAGagcuaGaaauagcaaGUUaAaAuAaggcuaGUcc | |
| | | | | GUUAucAAcuuGaaaaagugGcaccgagucggugcususus | |
| | | | | u | |
| Monkey | GA0710 | asasgsd | 52 | asasgsdAUdACdCUdGAdAUdAAdCUdCUdCgUU | 154 |
| (28) | | AUdA | | UUAGagcuaGaaauagcaaGUUaAaAuAaggcuaGUcc | |
| | | CdCUd | | GUUAucAAcuuGaaaaagugGcaccgagucggugcususus | |
| | | GAdA | | u | |
| | | UdAAd | | | |
| | | CUdC | | | |
| | | UdC | | | |
| Human | GA702 | asasgs | 53 | asasgsAUACCUGAdAUdAACCCUCGUUUUAG | 155 |
| (28) | | AUAC | | AGCUAGAAAUAGCAAGUUAAAAUAAGGCU | |
| | | CUGA | | AGUCCGUUAUCAACUUGAAAAAGUGGCAC | |
| | | dAUdA | | CGAGUCGGUGCUsususu | |
| | | ACCC | | | |
| | | UC | | | |
| | GA654 | | | asasgsAUACCUGAdAUdAACCCUCgUUUUAGa | 156 |
| | | | | gcuaGaaauagcaaGUUaAaAuAaggcuaGUccGUUAu | |
| | | | | cAAcuuGaaaaagugGcaccgagucggugcusususu | |
| Human | GA703 | sasdGs | 54 | asasdGsAUAdCCUGAdAUdAACCCUCGUUUUA | 157 |
| (29) | | AUAd | | GAGCUAGAAAUAGCAAGUUAAAAUAAGGC | |
| | | CCUG | | UAGUCCGUUAUCAACUUGAAAAAGUGGCA | |
| | | AdAUd | | CCGAGUCGGUGCUsususu | |
| | | AACC | | | |
| | | CUC | | | |
| | GA655 | | | asasdGsAUAdCCUGAdAUdAACCCUCgUUUUA | 158 |
| | | | | GagcuaGaaauagcaaGUUaAaAuAaggcuaGUccGUU | |
| | | | | AucAAcuuGaaaaagugGcaccgagucggugcusususu | |
| Human | GA704 | dAsdAs | 55 | dAsdAsdGsdAdUdAdCdCdUdGAAUAACCCUCG | 159 |
| (29) | | dGsdA | | UUUUAGAGCUAGAAAUAGCAAGUUAAAAU | |
| | | dUdAd | | AAGGCUAGUCCGUUAUCAACUUGAAAAAG | |
| | | CdCdU | | UGGCACCGAGUCGGUGCUsususu | |
| | | dGAA | | | |
| | | UAAC | | | |
| | | CCUC | | | |
| Human | GA705 | asasgsd | 56 | asasgsdAdUdACdCdUdGdAAUAACCCUCGUUU | 160 |
| (30) | | AdUdA | | UAGAGCUAGAAAUAGCAAGUUAAAAUAAG | |
| | | CdCdU | | GCUAGUCCGUUAUCAACUUGAAAAAGUGG | |
| | | dGdAA | | CACCGAGUCGGUGCUsususu | |
| | | UAAC | | | |
| | | CCUC | | | |
| Human | GA706 | asdAsg | 57 | asdAsgsdAdUdAdCdCUGdAdAUAACCCUCGUU | 161 |
| (31) | | sdAdU | | UUAGAGCUAGAAAUAGCAAGUUAAAAUAA | |
| | | dAdCd | | GGCUAGUCCGUUAUCAACUUGAAAAAGUG | |
| | | CUGd | | GCACCGAGUCGGUGCUsususu | |
| | | AdAU | | | |
| | | AACC | | | |
| | | CUC | | | |
| | GA631 | | | asdAsgsdAdUdAdCdCUGdAdAUAACCCUCgUU | 162 |
| | | | | UUAGagcuaGaaauagcaaGUUaAaAuAaggcuaGUcc | |
| | | | | GUUAucAAcuuGaaaaagugGcaccgagucggugcususus | |
| | | | | u | |
| Human | GA707 | asasdG | 58 | asasdGsdAdUdACdCdUdGdAAUAACCCUCGUU | 163 |
| (32) | | sdAdU | | UUAGAGCUAGAAAUAGCAAGUUAAAAUAA | |
| | | dACdC | | GGCUAGUCCGUUAUCAACUUGAAAAAGUG | |
| | | dUdGd | | GCACCGAGUCGGUGCUsususu | |
| | | AAUA | | | |
| | | ACCC | | | |
| | | UC | | | |
| Human | GA708 | asasgsd | 59 | asasgsdAdUdAdCCUGAdAdUAACCCUdCGUUU | 164 |
| (33) | | AdUdA | | UAGAGCUAGAAAUAGCAAGUUAAAAUAAG | |
| | | dCCU | | GCUAGUCCGUUAUCAACUUGAAAAAGUGG | |
| | | GAdAd | | CACCGAGUCGGUGCUsususu | |
| | | UAAC | | | |
| | | CCUdC | | | |
| Human | GA709 | Asasgs | 60 | dAsasgsdAdUdAdCCUGAdAdUAACCCUdCGUU | 165 |
| (34) | | dAdUd | | UUAGAGCUAGAAAUAGCAAGUUAAAAUAA | |
| | | AdCC | | GGCUAGUCCGUUAUCAACUUGAAAAAGUG | |
| | | UGAd | | GCACCGAGUCGGUGCUsususu | |
| | | AdUA | | | |
| | | ACCC | | | |
| | | UdC | | | |
| Human | GA710 | dAsasg | 61 | dAsasgsdAdUAdCdCdUdGdAAdUAACdCCUCGU | 166 |
| (35) | | sdAdU | | UUUAGAGCUAGAAAUAGCAAGUUAAAAUA | |
| | | AdCdC | | AGGCUAGUCCGUUAUCAACUUGAAAAAGU | |
| | | dUdGd | | GGCACCGAGUCGGUGCUsususu | |
| | | AAdU | | | |
| | | AACd | | | |
| | | CCUC | | | |
| Human | GA711 | asasgsd | 62 | asasgsdAdUAdCdCdUdGdAAdUAACdCCUCGUU | 167 |
| (36) | | AdUAd | | UUAGAGCUAGAAAUAGCAAGUUAAAAUAA | |
| | | CdCdU | | GGCUAGUCCGUUAUCAACUUGAAAAAGUG | |
| | | dGdAA | | GCACCGAGUCGGUGCUsususu | |
| | | dUAA | | | |
| | | CdCCU | | | |
| | | C | | | |
| Human | GA712 | asasdG | 63 | asasdGsdAdUdACCUGAAUAACCCUCGUUUUA | 168 |
| (37) | | sdAdU | | GAGCUAGAAAUAGCAAGUUAAAAUAAGGC | |
| | | dACC | | UAGUCCGUUAUCAACUUGAAAAAGUGGCA | |
| | | UGAA | | CCGAGUCGGUGCUsususu | |
| | | UAAC | | | |
| | | CCUC | | | |
| | GA632 | | | asasdGsdAdUdACCUGAAUAACCCUCgUUUUA | 169 |
| | | | | GagcuaGaaauagcaaGUUaAaAuAaggcuaGUccGUU | |
| | | | | AucAAcuuGaaaaagugGcaccgagucggugcusususu | |
| Monkey | GA0749 | asasdG | 64 | asasdGsdAdUdACCUGAAUAACUCUCgUUUUA | 170 |
| (37) | | sdAdU | | GagcuaGaaauagcaaGUUaAaAuAaggcuaGUccGUU | |
| | | dACC | | AucAAcuuGaaaaagugGcaccgagucggugcusususu | |
| | | UGAA | | | |
| | | UAAC | | | |
| | | UCUC | | | |
| Human | GA713 | asdAsd | 65 | asdAsdGsdAdUdACdCUdGAdAUdAAdCCdCUdC | 171 |
| (38) | | GsdAd | | GUUUUAGAGCUAGAAAUAGCAAGUUAAAA | |
| | | UdACd | | UAAGGCUAGUCCGUUAUCAACUUGAAAAA | |
| | | CUdG | | GUGGCACCGAGUCGGUGCUsususu | |
| | | AdAUd | | | |
| | | AAdC | | | |
| | | CdCUd | | | |
| | | C | | | |
| | GA0666 | | | asdAsdGsdAdUdACdCUdGAdAUdAAdCCdCUdC | 172 |
| | | | | gUUUUAGagcuaGaaauagcaaGUUaAaAuAaggcua | |
| | | | | GUccGUUAucAAcuuGaaaaagugGcaccgagucggugc | |
| | | | | usususu | |
| Monkey | GA0711 | asdAsd | 66 | asdAsdGsdAdUdACdCUdGAdAUdAAdCUdCUdC | 173 |
| (38) | | GsdAd | | gUUUUAGagcuaGaaauagcaaGUUaAaAuAaggcua | |
| | | UdACd | | GUccGUUAucAAcuuGaaaaagugGcaccgagucggugc | |
| | | CUdG | | usususu | |
| | | AdAUd | | | |
| | | AAdC | | | |
| | | UdCUd | | | |
| | | C | | | |
| Human | GA714 | dAsdAs | 67 | dAsdAsgsadUdAdCdCdUdGdAAUdAAdCCdCUC | 174 |
| (39) | | gsadUd | | GUUUUAGAGCUAGAAAUAGCAAGUUAAAA | |
| | | AdCdC | | UAAGGCUAGUCCGUUAUCAACUUGAAAAA | |
| | | dUdGd | | GUGGCACCGAGUCGGUGCUsususu | |
| | | AAUd | | | |
| | | AAdC | | | |
| | | CdCUC | | | |
| Human | GA715 | dAsdAs | 68 | dAsdAsgsadUdAdCdCdUdGdAAUdAACdCCU | 175 |
| (39) | | gsadUd | | CGUUUUAGAGCUAGAAAUAGCAAGUUAAAAU | |
| | | AdCdC | | AAGGCUAGUCCGUUAUCAACUUGAAAAAG | |
| | | dUdGd | | UGGCACCGAGUCGGUGCUsususu | |
| | | AAUd | | | |
| | | AACd | | | |
| | | CCUC | | | |
| | GA633 | | | dAsdAsgsadUdAdCdCdUdGdAAUdAACdCCUCg | 176 |
| | | | | UUUUAGagcuaGaaauagcaaGUUaAaAuAaggcuaG | |
| | | | | UccGUUAucAAcuuGaaaaagugGcaccgagucggug | |
| | | | | cusususu | |
| Monkey | N/A | No | | N/A | |
| (40) | | monkey | | | |
| | | sequence | | | |
| | | designed | | | |
| | | and | | | |
| | | evaluated | | | |

[0580] Uppercase nucleotides (A, C, G, I and U) indicate ribonucleotides, adenine, guanine, cytosine, inosine, and uracil, respectively and lowercase nucleotides (a, g, c, i and u) indicate 2′-O-methylribonucleotide (2′-OMe) unless otherwise specified. dA, dC and dG indicate 2′-deoxyadenosine, 2′-deoxycytidine and 2′-deoxyguanosine; dU indicates thymidine and/or 2′-deoxyuridine. Underline in gRNA sequence indicate spacer sequence. s: phosphorothioate (PS).

[0581] A summary of the spacer sequences and the guide nucleic acids is provided in Table 8.

TABLE 8
Guide nucleic acid sequences

| | Guide | | SEQ | | SEQ |
|---|---|---|---|---|---|
| | nucleic | Protospacer | ID | | ID |
| Gene Target | acid ID | (5′-3′) | NO | Sequence (5′-3′) | NO |
| cANG | GA547 | AAGATACC | 177 | asasgsAUACCUGAAUAACUCUCgUU | 432 |
| PTL3 | | TGAATAAC | | UUAGagcuaGaaauagcaaGUUaAaAuAag | |
| | | TCTC | | gcuaGUccGUUAucAAcuuGaaaaagugGca | |
| | | | | ccgagucggugcusususuUUu | |
| hANG | GA627 | AAGATACC | 178 | asasgsAdUAdCCdUGdAAdUAdACdCC | 433 |
| PTL3 | | TGAATAAC | | dUCgUUUUAGagcuaGaaauagcaaGUUa | |
| | | CCTC | | AaAuAaggcuaGUccGUUAucAAcuuGaa | |
| | | | | aaagugGcaccgagucggugcusususu | |
| hANG | GA628 | AAGATACC | 179 | asasgsdAUdACdCUdGAdAUdAAdCCd | 434 |
| PTL3 | | TGAATAAC | | CUdCgUUUUAGagcuaGaaauagcaaGUU | |
| | | CCTC | | aAaAuAaggcuaGUccGUUAucAAcuuGa | |
| | | | | aaaagugGcaccgagucggugcusususu | |
| hANG | GA629 | AAGATACC | 180 | asasdGsdAdUdACdCUdGAdAUdAAdC | 435 |
| PTL3 | | TGAATAAC | | CdCUdCgUUUUAGagcuaGaaauagcaaG | |
| | | CCTC | | UUaAaAuAaggcuaGUccGUUAucAAcuu | |
| | | | | GaaaaagugGcaccgagucggugcusususu | |
| hANG | GA630 | AAGATACC | 181 | asasdGsdAdUdAdCdCdUdGAdAUdAAd | 436 |
| PTL3 | | TGAATAAC | | CCdCUdCgUUUUAGagcuaGaaauagcaa | |
| | | CCTC | | GUUaAaAuAaggcuaGUccGUUAucAAc | |
| | | | | uuGaaaaagugGcaccgagucggugcusususu | |
| hANG | GA0631 | AAGATACC | 182 | asasgsdAdUdACCUGAAUAACCCUCg | 437 |
| PTL3 | | TGAATAAC | | UUUUAGagcuaGaaauagcaaGUUaAaAu | |
| | | CCTC | | AaggcuaGUccGUUAucAAcuuGaaaaagu | |
| | | | | gGcaccgagucggugcusususu | |
| hANG | GA632 | AAGATACC | 183 | asasdGsdAdUdACCUGAAUAACCCUC | 438 |
| PTL3 | | TGAATAAC | | gUUUUAGagcuaGaaauagcaaGUUaAaAu | |
| | | CCTC | | AaggcuaGUccGUUAucAAcuuGaaaaagu | |
| | | | | gGcaccgagucggugcusususu | |
| hANG | GA0633 | AAGATACC | 184 | asasgsdAdUdAdCCUGAAUAACCCUCg | 439 |
| PTL3 | | TGAATAAC | | UUUUAGagcuaGaaauagcaaGUUaAaAu | |
| | | CCTC | | AaggcuaGUccGUUAucAAcuuGaaaaagu | |
| | | | | gGcaccgagucggugcusususu | |
| hANG | GA723 | AAGATACC | 185 | asasdGsdAdUdAdCCUGAAUAACCCU | 440 |
| PTL3 | | TGAATAAC | | CgUUUUAGagcuaGaaauagcaaGUUaAa | |
| | | CCTC | | AuAaggcuaGUccGUUAucAAcuuGaaaaa | |
| | | | | gugGcaccgagucggugcusususu | |
| hANG | GA0635 | AAGATACC | 186 | asasgsdAdUdAdCdCUGAAUAACCCUC | 441 |
| PTL3 | | TGAATAAC | | gUUUUAGagcuaGaaauagcaaGUUaAaAu | |
| | | CCTC | | AaggcuaGUccGUUAucAAcuuGaaaaagu | |
| | | | | gGcaccgagucggugcusususu | |
| hANG | GA636 | AAGATACC | 187 | asasdGsdAdUdAdCdCUGAAUAACCC | 442 |
| PTL3 | | TGAATAAC | | UCgUUUUAGagcuaGaaauagcaaGUUaA | |
| | | CCTC | | aAuAaggcuaGUccGUUAucAAcuuGaaaa | |
| | | | | agugGcaccgagucggugcusususu | |
| hANG | GA0637 | AAGATACC | 188 | asasgsdAdUdAdCdCdUGAAUAACCCU | 443 |
| PTL3 | | TGAATAAC | | CgUUUUAGagcuaGaaauagcaaGUUaAa | |
| | | CCTC | | AuAaggcuaGUccGUUAucAAcuuGaaaaa | |
| | | | | gugGcaccgagucggugcusususu | |
| hANG | GA638 | AAGATACC | 189 | asasdGsdAdUdAdCdCdUGAAUAACCC | 444 |
| PTL3 | | TGAATAAC | | UCgUUUUAGagcuaGaaauagcaaGUUaA | |
| | | CCTC | | aAuAaggcuaGUccGUUAucAAcuuGaaaa | |
| | | | | agugGcaccgagucggugcusususu | |
| hANG | GA639 | AAGATACC | 190 | asasgsdAdUdAdCdCdUdGAAUAACCC | 445 |
| PTL3 | | TGAATAAC | | UCgUUUUAGagcuaGaaauagcaaGUUaA | |
| | | CCTC | | aAuAaggcuaGUccGUUAucAAcuuGaaaa | |
| | | | | agugGcaccgagucggugcusususu | |
| hANG | GA640 | AAGATACC | 191 | asasdGsdAdUdAdCdCdUdGAAUAACC | 446 |
| PTL3 | | TGAATAAC | | CUCgUUUUAGagcuaGaaauagcaaGUUa | |
| | | CCTC | | AaAuAaggcuaGUccGUUAucAAcuuGaa | |
| | | | | aaagugGcaccgagucggugcusususu | |
| hANG | GA641 | AAGATACC | 192 | asasgsAUdACCUGAAUAAdCCCUCgU | 447 |
| PTL3 | | TGAATAAC | | UUUAGagcuaGaaauagcaaGUUaAaAuAa | |
| | | CCTC | | ggcuaGUccGUUAucAAcuuGaaaaagugG | |
| | | | | caccgagucggugcusususu | |
| hANG | GA642 | AAGATACC | 193 | asasgsAUACCUdGAAdUAACCdCUCg | 448 |
| PTL3 | | TGAATAAC | | UUUUAGagcuaGaaauagcaaGUUaAaAu | |
| | | CCTC | | AaggcuaGUccGUUAucAAcuuGaaaaagu | |
| | | | | gGcaccgagucggugcusususu | |
| hANG | GA643 | AAGATACC | 194 | asasgsdAdUdAdCCdUdGAAdUdAACC | 449 |
| PTL3 | | TGAATAAC | | CUCguuuuagagcuagaaauagcaaguuaaaaua | |
| | | CCTC | | aggcuaguccguuaucaacuugaaaaaguggcaccg | |
| | | | | agucggugcusususu | |
| hANG | GA745 | AAGATACC | 195 | asasdGsdAUdAdCCUGAAUAACCCUC | 450 |
| PTL3 | | TGAATAAC | | gUUUUAGagcuaGaaauagcaaGUUaAaAu | |
| | | CCTC | | AaggcuaGUccGUUAucAAcuuGaaaaagu | |
| | | | | gGcaccgagucggugcusususu | |
| hANG | GA837 | AAGATACC | 196 | asasdGsdAUdAdCdCUGAAUAACCCU | 451 |
| PTL3 | | TGAATAAC | | CgUUUUAGagcuaGaaauagcaaGUUaAa | |
| | | CCTC | | AuAaggcuaGUccGUUAucAAcuuGaaaaa | |
| | | | | gugGcaccgagucggugcusususu | |
| hANG | GA646 | AAGATACC | 197 | asasdGsdAUdAdCdCdUGAAUAACCC | 452 |
| PTL3 | | TGAATAAC | | UCgUUUUAGagcuaGaaauagcaaGUUaA | |
| | | CCTC | | aAuAaggcuaGUccGUUAucAAcuuGaaaa | |
| | | | | agugGcaccgagucggugcusususu | |
| hANG | GA647 | AAGATACC | 198 | asasdGsdAUdAdCdCdUdGAAUAACCC | 453 |
| PTL3 | | TGAATAAC | | UCgUUUUAGagcuaGaaauagcaaGUUaA | |
| | | CCTC | | aAuAaggcuaGUccGUUAucAAcuuGaaaa | |
| | | | | agugGcaccgagucggugcusususu | |
| hANG | GA648 | AAGATACC | 199 | asasdGsdAUAdCdCdUGAAUAACCCU | 454 |
| PTL3 | | TGAATAAC | | CgUUUUAGagcuaGaaauagcaaGUUaAa | |
| | | CCTC | | AuAaggcuaGUccGUUAucAAcuuGaaaaa | |
| | | | | gugGcaccgagucggugcusususu | |
| hANG | GA649 | AAGATACC | 200 | asasdGsdAUAdCdCdUdGAAUAACCC | 455 |
| PTL3 | | TGAATAAC | | UCgUUUUAGagcuaGaaauagcaaGUUaA | |
| | | CCTC | | aAuAaggcuaGUccGUUAucAAcuuGaaaa | |
| | | | | agugGcaccgagucggugcusususu | |
| hANG | GA650 | AAGATACC | 201 | asasdGsAdUAdCCdUGAAUAACCCUC | 456 |
| PTL3 | | TGAATAAC | | gUUUUAGagcuaGaaauagcaaGUUaAaAu | |
| | | CCTC | | AaggcuaGUccGUUAucAAcuuGaaaaagu | |
| | | | | gGcaccgagucggugcusususu | |
| hANG | GA651 | AAGATACC | 202 | asasgsdAUdACdCUdGAAUAACCCUCg | 457 |
| PTL3 | | TGAATAAC | | UUUUAGagcuaGaaauagcaaGUUaAaAu | |
| | | CCTC | | AaggcuaGUccGUUAucAAcuuGaaaaagu | |
| | | | | gGcaccgagucggugcusususu | |
| hANG | GA652 | AAGATACC | 203 | asasgsAUACCdUGAAdUAACCCUCgU | 458 |
| PTL3 | | TGAATAAC | | UUUAGagcuaGaaauagcaaGUUaAaAuAa | |
| | | CCTC | | ggcuaGUccGUUAucAAcuuGaaaaagugG | |
| | | | | caccgagucggugcusususu | |
| hANG | GA653 | AAGATACC | 204 | asasdGsAUAdCCdUGAAdUAACCCUC | 459 |
| PTL3 | | TGAATAAC | | gUUUUAGagcuaGaaauagcaaGUUaAaAu | |
| | | CCTC | | AaggcuaGUccGUUAucAAcuuGaaaaagu | |
| | | | | gGcaccgagucggugcusususu | |
| hANG | GA654 | AAGATACC | 205 | asasgsAUACCUGAdAUdAACCCUCgU | 460 |
| PTL3 | | TGAATAAC | | UUUAGagcuaGaaauagcaaGUUaAaAuAa | |
| | | CCTC | | ggcuaGUccGUUAucAAcuuGaaaaagugG | |
| | | | | caccgagucggugcusususu | |
| hANG | GA655 | AAGATACC | 206 | asasdGsAUAdCCUGAdAUdAACCCUC | 461 |
| PTL3 | | TGAATAAC | | gUUUUAGagcuaGaaauagcaaGUUaAaAu | |
| | | CCTC | | AaggcuaGUccGUUAucAAcuuGaaaaagu | |
| | | | | gGcaccgagucggugcusususu | |
| hANG | GA718 | AAGATACC | 207 | asasgsAUA+CCUGAAUAACCCUCguu | 462 |
| PTL3 | | TGAATAAC | | uuagagcuagaaauagcaaguuaaaauaaggcuagu | |
| | | CCTC | | ccguuaucaacuugaaaaaguggcaccgagucggug | |
| | | | | cusususu | |
| hANG | GA719 | AAGATACC | 208 | asasgsAUA+C+CUGAAUAACCCUCgu | 463 |
| PTL3 | | TGAATAAC | | uuuagagcuagaaauagcaaguuaaaauaaggcuag | |
| | | CCTC | | uccguuaucaacuugaaaaaguggcaccgagucggu | |
| | | | | gcusususu | |
| hANG | GA670 | AAGATACC | 209 | asasgsAUACCUGAAUAACZCUCgUU | 464 |
| PTL3/ | | TGAATAAC | | UUAGagcuaGaaauagcaaGUUaAaAuAag | |
| cANG | | CCTC/AAG | | gcuaGUccGUUAucAAcuuGaaaaagugGca | |
| PTL3 | | ATACCTGA | | ccgagucggugcusususu | |
| | | ATAACTCT | | | |
| | | C | | | |
| hANG | GA671 | AAGATACC | 210 | asasgsAZACCZGAAUAACCCUCgUUU | 465 |
| PTL3 | | TGAATAAC | | UAGagcuaGaaauagcaaGUUaAaAuAaggc | |
| | | CCTC/AAG | | uaGUccGUUAucAAcuuGaaaaagugGcacc | |
| | | ATACCTGA | | gagucggugusususu | |
| | | ATAACTCT | | | |
| | | C | | | |
| hANG | GA0660 | TCGGAAG | 211 | ucggasasgsAUACCUGAAZAACZCUCg | 466 |
| PTL3/ | | ATACCTGA | | UUUUAGagcuaGaaauagcaaGUUaAaAu | |
| cANG | | ATAACCCT | | AaggcuaGUccGUUAucAAcuuGaaaaagu | |
| PTL3 | | C/TCGGAA | | gGcaccgagugcusususu | |
| | | GATACCTG | | | |
| | | AATAACTC | | | |
| | | TC | | | |
| hANG | GA673 | AAGATACC | 212 | asasgsAZACCUGAAZAACZCUCgUUU | 467 |
| PTL3/ | | TGAATAAC | | UAGagcuaGaaauagcaaGUUaAaAuAaggc | |
| cANG | | CCTC/AAG | | uaGUccGUUAucAAcuuGaaaaagugGcacc | |
| PTL3 | | ATACCTGA | | gagucggugcusususu | |
| | | ATAACTCT | | | |
| | | C | | | |
| hANG | GA674 | AAGATACC | 213 | asasgsAZACCZGAAUAACZCUCgUUU | 468 |
| PTL3/ | | TGAATAAC | | UAGagcuaGaaauagcaaGUUaAaAuAaggc | |
| cANG | | CCTC/AAG | | uaGUccGUUAucAAcuuGaaaaagugGcacc | |
| PTL3 | | ATACCTGA | | gagucggugcusususu | |
| | | ATAACTCT | | | |
| | | C | | | |
| cANG | GA664 | AAGATACC | 214 | asasdGsdAdUdAdCdCdUdGAdAUdAAd | 469 |
| PTL3 | | TGAATAAC | | CUdCUdCgUUUUAGagcuaGaaauagcaa | |
| | | TCTC | | GUUaAaAuAaggcuaGUccGUUAucAAc | |
| | | | | uuGaaaaagugGcaccgagucggugcusususu | |
| cANG | GA0664 | AAGATACC | 215 | asasgsdAdUdAdCdCdUdGAAUAACUC | 470 |
| PTL3 | | TGAATAAC | | UCgUUUUAGagcuaGaaauagcaaGUUaA | |
| | | TCTC | | aAuAaggcuaGUccGUUAucAAcuuGaaaa | |
| | | | | agugGcaccgagucggugcusususu | |
| cANG | GA0665 | AAGATACC | 216 | asasdGsdAdUdAdCdCdUdGAAUAACU | 471 |
| PTL3 | | TGAATAAC | | CUCgUUUUAGagcuaGaaauagcaaGUUa | |
| | | TCTC | | AaAuAaggcuaGUccGUUAucAAcuuGaa | |
| | | | | aaagugGcaccgagucggugcusususu | |
| cANG | GA0666 | AAGATACC | 217 | asdAsdGsdAdUdACdCUdGAdAUdAAd | 472 |
| PTL3 | | TGAATAAC | | CCdCUdCgUUUUAGagcuaGaaauagcaa | |
| | | TCTC | | GUUaAaAuAaggcuaGUccGUUAucAAc | |
| | | | | uuGaaaaagugGcaccgagucggugcusususu | |
| cANG | GA0667 | AAGATACC | 218 | asasdGsdAdUdAdCdCUdGAdAUdAAdC | 473 |
| PTL3 | | TGAATAAC | | CdCUdCgUUUUAGagcuaGaaauagcaaG | |
| | | TCTC | | UUaAaAuAaggcuaGUccGUUAucAAcuu | |
| | | | | GaaaaagugGcaccgagucggugcusususu | |
| hANG | GA0668 | AAGATACC | 219 | asasgsdAdUdACdCUdGAdAUdAAdCCd | 474 |
| PTL3 | | TGAATAAC | | CUdCgUUUUAGagcuaGaaauagcaaGUU | |
| | | CCTC | | aAaAuAaggcuaGUccGUUAucAAcuuGa | |
| | | | | aaaagugGcaccgagucggugcusususu | |
| hANG | GA0669 | AAGATACC | 220 | asasdGsdAdUdAdCdCdUdGdAdAUdAA | 475 |
| PTL3 | | TGAATAAC | | dCCdCUdCgUUUUAGagcuaGaaauagcaa | |
| | | CCTC | | GUUaAaAuAaggcuaGUccGUUAucAAc | |
| | | | | uuGaaaaagugGcaccgagucggugcusususu | |
| hANG | GA0670 | AAGATACC | 221 | asasdGsdAdUdAdCdCdUdGdAdAdUdA | 476 |
| PTL3 | | TGAATAAC | | AdCCdCUdCgUUUUAGagcuaGaaauagc | |
| | | CCTC | | aaGUUaAaAuAaggcuaGUccGUUAucA | |
| | | | | AcuuGaaaaagugGcaccgagucggugcususus | |
| | | | | u | |
| hANG | GA0671 | AAGATACC | 222 | asasdGsdAdUdAdCdCdUdGdAdAdUdA | 477 |
| PTL3 | | TGAATAAC | | dAdCCdCUdCgUUUUAGagcuaGaaauag | |
| | | CCTC | | caaGUUaAaAuAaggcuaGUccGUUAucA | |
| | | | | AcuuGaaaaagugGcaccgagucggugcususus | |
| | | | | u | |
| hANG | GA0672 | AAGATACC | 223 | asasdGsdAdUdAdCdCdUdGdAdAdUdA | 478 |
| PTL3 | | TGAATAAC | | dAdCdCdCUdCgUUUUAGagcuaGaaaua | |
| | | CCTC | | gcaaGUUaAaAuAaggcuaGUccGUUAuc | |
| | | | | AAcuuGaaaaagugGcaccgagucggugcususu | |
| | | | | su | |
| hANG | GA0673 | AAGATACC | 224 | asasdGsdAdUdAdCdCdUdGdAdAdUdA | 479 |
| PTL3 | | TGAATAAC | | dAdCdCdCdUdCgUUUUAGagcuaGaaau | |
| | | CCTC | | agcaaGUUaAaAuAaggcuaGUccGUUAuc | |
| | | | | AAcuuGaaaaagugGcaccgagucggugcususu | |
| | | | | su | |
| hANG | GA0674 | AAGATACC | 225 | asdAsdGsdAdUdAdCdCdUdGdAdAdUd | 480 |
| PTL3 | | TGAATAAC | | AdAdCdCdCdUdCgUUUUAGagcuaGaa | |
| | | CCTC | | auagcaaGUUaAaAuAaggcuaGUccGUUA | |
| | | | | ucAAcuuGaaaaagugGcaccgagucggugcusu | |
| | | | | susu | |
| hANG | GA0675 | AAGATACC | 226 | asasgsdAdUAdCCdUGdAAdUAdACdC | 481 |
| PTL3 | | TGAATAAC | | CdUCgUUUUAGagcuaGaaauagcaaGUU | |
| | | CCTC | | aAaAuAaggcuaGUccGUUAucAAcuuGa | |
| | | | | aaaagugGcaccgagucggugcusususu | |
| hANG | GA0676 | AAGATACC | 227 | asasdGsAdUAdCCdUGdAAdUAdACdC | 482 |
| PTL3 | | TGAATAAC | | CdUCgUUUUAGagcuaGaaauagcaaGUU | |
| | | CCTC | | aAaAuAaggcuaGUccGUUAucAAcuuGa | |
| | | | | aaaagugGcaccgagucggugcusususu | |
| hANG | GA0677 | AAGATACC | 228 | asasdGsdAdUAdCCdUGdAAdUAdACd | 483 |
| PTL3 | | TGAATAAC | | CCdUCgUUUUAGagcuaGaaauagcaaGU | |
| | | CCTC | | UaAaAuAaggcuaGUccGUUAucAAcuuG | |
| | | | | aaaaagugGcaccgagucggugcusususu | |
| hANG | GA0678 | AAGATACC | 229 | asasdGsdAdUdAdCCdUGdAAdUAdACd | 484 |
| PTL3 | | TGAATAAC | | CCdUCgUUUUAGagcuaGaaauagcaaGU | |
| | | CCTC | | UaAaAuAaggcuaGUccGUUAucAAcuuG | |
| | | | | aaaaagugGcaccgagucggugcusususu | |
| hANG | GA0679 | AAGATACC | 230 | asasdGsdAdUdAdCdCdUGdAAdUAdAC | 485 |
| PTL3 | | TGAATAAC | | dCCdUCgUUUUAGagcuaGaaauagcaaG | |
| | | CCTC | | UUaAaAuAaggcuaGUccGUUAucAAcuu | |
| | | | | GaaaaagugGcaccgagucggugcusususu | |
| hANG | GA0680 | AAGATACC | 231 | asasdGsdAdUdAdCdCdUdGdAAdUAdA | 486 |
| PTL3 | | TGAATAAC | | CdCCdUCgUUUUAGagcuaGaaauagcaa | |
| | | CCTC | | GUUaAaAuAaggcuaGUccGUUAucAAc | |
| | | | | uuGaaaaagugGcaccgagucggugcusususu | |
| hANG | GA0681 | AAGATACC | 232 | asasdGsdAdUdAdCdCdUdGdAdAdUAd | 487 |
| PTL3 | | TGAATAAC | | ACdCCdUCgUUUUAGagcuaGaaauagca | |
| | | CCTC | | aGUUaAaAuAaggcuaGUccGUUAucAA | |
| | | | | cuuGaaaaagugGcaccgagucggugcusususu | |
| hANG | GA0682 | AAGATACC | 233 | asasdGsdAdUdAdCdCdUdGdAdAdUdA | 488 |
| PTL3 | | TGAATAAC | | dACdCCdUCgUUUUAGagcuaGaaauagc | |
| | | CCTC | | aaGUUaAaAuAaggcuaGUccGUUAucA | |
| | | | | AcuuGaaaaagugGcaccgagucggugcususus | |
| | | | | u | |
| hANG | GA0683 | AAGATACC | 234 | asasdGsdAdUdAdCdCdUdGdAdAdUdA | 489 |
| PTL3 | | TGAATAAC | | dAdCdCCdUCgUUUUAGagcuaGaaauag | |
| | | CCTC | | caaGUUaAaAuAaggcuaGUccGUUAucA | |
| | | | | AcuuGaaaaagugGcaccgagucggugcususus | |
| | | | | u | |
| hANG | GA0684 | AAGATACC | 235 | asasdGsdAdUdAdCdCdUdGdAdAdUdA | 490 |
| PTL3 | | TGAATAAC | | dAdCdCdCdUCgUUUUAGagcuaGaaaua | |
| | | CCTC | | gcaaGUUaAaAuAaggcuaGUccGUUAuc | |
| | | | | AAcuuGaaaaagugGcaccgagucggugcususu | |
| | | | | su | |
| hANG | GA0685 | AAGATACC | 236 | asasgsdAdUdAdCdCUdGAdAUdAAdCC | 491 |
| PTL3 | | TGAATAAC | | dCUdCgUUUUAGagcuaGaaauagcaaGU | |
| | | CCTC | | UaAaAuAaggcuaGUccGUUAucAAcuuG | |
| | | | | aaaaagugGcaccgagucggugcusususu | |
| hANG | GA0686 | AAGATACC | 237 | asasgsdAdUdAdCdCdUdGAdAUdAAdC | 492 |
| PTL3 | | TGAATAAC | | CdCUdCgUUUUAGagcuaGaaauagcaaG | |
| | | CCTC | | UUaAaAuAaggcuaGUccGUUAucAAcuu | |
| | | | | GaaaaagugGcaccgagucggugcusususu | |
| hANG | GA0687 | AAGATACC | 238 | asasgsdAdUdAdCdCdUdGdAdAUdAAd | 493 |
| PTL3 | | TGAATAAC | | CCdCUdCgUUUUAGagcuaGaaauagcaa | |
| | | CCTC | | GUUaAaAuAaggcuaGUccGUUAucAAc | |
| | | | | uuGaaaaagugGcaccgagucggugcusususu | |
| hANG | GA0688 | AAGATACC | 239 | asasgsdAdUdAdCdCdUdGdAdAdUdAA | 494 |
| PTL3 | | TGAATAAC | | dCCdCUdCgUUUUAGagcuaGaaauagcaa | |
| | | CCTC | | GUUaAaAuAaggcuaGUccGUUAucAAc | |
| | | | | uuGaaaaagugGcaccgagucggugcusususu | |
| hANG | GA0689 | AAGATACC | 240 | asasgsdAdUdAdCdCdUdGdAdAdUdAd | 495 |
| PTL3 | | TGAATAAC | | AdCCdCUdCgUUUUAGagcuaGaaauagc | |
| | | CCTC | | aaGUUaAaAuAaggcuaGUccGUUAucA | |
| | | | | AcuuGaaaaagugGcaccgagucggugcususus | |
| | | | | u | |
| hANG | GA0690 | AAGATACC | 241 | asasgsdAdUdAdCdCdUdGdAdAdUdAd | 496 |
| PTL3 | | TGAATAAC | | AdCdCdCUdCgUUUUAGagcuaGaaauag | |
| | | CCTC | | caaGUUaAaAuAaggcuaGUccGUUAucA | |
| | | | | AcuuGaaaaagugGcaccgagucggugcususus | |
| | | | | u | |
| hANG | GA0691 | AAGATACC | 242 | asasgsdAdUdAdCdCdUdGdAdAdUdAd | 497 |
| PTL3 | | TGAATAAC | | AdCdCdCdUdCgUUUUAGagcuaGaaaua | |
| | | CCTC | | gcaaGUUaAaAuAaggcuaGUccGUUAuc | |
| | | | | AAcuuGaaaaagugGcaccgagucggugcususu | |
| | | | | su | |
| hANG | GA0692 | AAGATACC | 243 | asasgsdAdUdAdCCdUGdAAdUAdACdC | 498 |
| PTL3 | | TGAATAAC | | CdUCgUUUUAGagcuaGaaauagcaaGUU | |
| | | CCTC | | aAaAuAaggcuaGUccGUUAucAAcuuGa | |
| | | | | aaaagugGcaccgagucggugcusususu | |
| hANG | GA0693 | AAGATACC | 244 | asasgsdAdUdAdCdCdUGdAAdUAdACd | 499 |
| PTL3 | | TGAATAAC | | CCdUCgUUUUAGagcuaGaaauagcaaGU | |
| | | CCTC | | UaAaAuAaggcuaGUccGUUAucAAcuuG | |
| | | | | aaaaagugGcaccgagucggugcusususu | |
| hANG | GA0694 | AAGATACC | 245 | asasgsdAdUdAdCdCdUdGdAAdUAdAC | 500 |
| PTL3 | | TGAATAAC | | dCCdUCgUUUUAGagcuaGaaauagcaaG | |
| | | CCTC | | UUaAaAuAaggcuaGUccGUUAucAAcuu | |
| | | | | GaaaaagugGcaccgagucggugcusususu | |
| hANG | GA0695 | AAGATACC | 246 | asasgsdAdUdAdCdCdUdGdAdAdUAdA | 501 |
| PTL3 | | TGAATAAC | | CdCCdUCgUUUUAGagcuaGaaauagcaa | |
| | | CCTC | | GUUaAaAuAaggcuaGUccGUUAucAAc | |
| | | | | uuGaaaaagugGcaccgagucggugcusususu | |
| hANG | GA0696 | AAGATACC | 247 | asasgsdAdUdAdCdCdUdGdAdAdUdAd | 502 |
| PTL3 | | TGAATAAC | | ACdCCdUCgUUUUAGagcuaGaaauagca | |
| | | CCTC | | aGUUaAaAuAaggcuaGUccGUUAucAA | |
| | | | | cuuGaaaaagugGcaccgagucggugcusususu | |
| hANG | GA0697 | AAGATACC | 248 | asasgsdAdUdAdCdCdUdGdAdAdUdAd | 503 |
| PTL3 | | TGAATAAC | | AdCdCCdUCgUUUUAGagcuaGaaauagc | |
| | | CCTC | | aaGUUaAaAuAaggcuaGUccGUUAucA | |
| | | | | AcuuGaaaaagugGcaccgagucggugcususus | |
| | | | | u | |
| hANG | GA0698 | AAGATACC | 249 | asasgsdAdUdAdCdCdUdGdAdAdUdAd | 504 |
| PTL3 | | TGAATAAC | | AdCdCdCdUCgUUUUAGagcuaGaaauag | |
| | | CCTC | | caaGUUaAaAuAaggcuaGUccGUUAucA | |
| | | | | AcuuGaaaaagugGcaccgagucggugcususus | |
| | | | | u | |
| hANG | GA0699 | AAGATACC | 250 | asasgsAdUACCUGAAUAdACCCUCgU | 505 |
| PTL3 | | TGAATAAC | | UUUAGagcuaGaaauagcaaGUUaAaAuAa | |
| | | CCTC | | ggcuaGUccGUUAucAAcuuGaaaaagugG | |
| | | | | caccgagucggugcusususu | |
| hANG | GA0700 | AAGATACC | 251 | asasgsAUACCUGdAAUdAACCCdUCg | 506 |
| PTL3 | | TGAATAAC | | UUUUAGagcuaGaaauagcaaGUUaAaAu | |
| | | CCTC | | AaggcuaGUccGUUAucAAcuuGaaaaagu | |
| | | | | gGcaccgagucggugcusususu | |
| hANG | GA441 | AAGATACC | 252 | asasgsAUACCUGAAUAACCCUCgUU | 507 |
| PTL3 | | TGAATAAC | | UUAGagcuaGaaauagcaaGUUaAaAuAag | |
| | | CCTC | | gcuaGUccGUUAucAAcuuGaaaaagugGca | |
| | | | | ccgagucggugcusususu | |
| hANG | GA0702 | AAGATACC | 253 | asasgsAZACCUGAAUAACCCUCgUU | 508 |
| PTL3 | | TGAATAAC | | UUAGagcuaGaaauagcaaGUUaAaAuAag | |
| | | CCTC | | gcuaGUccGUUAucAAcuuGaaaaagugGca | |
| | | | | ccgagucggugcusususu | |
| hANG | GA665 | AAGATACC | 254 | asasdGsdAdUdACdCUdGAdAUdAAdC | 509 |
| PTL3 | | TGAATAAC | | UdCUdCgUUUUAGagcuaGaaauagcaaG | |
| | | CCTC | | UUaAaAuAaggcuaGUccGUUAucAAcuu | |
| | | | | GaaaaagugGcaccgagucggugcusususu | |
| hANG | GA0704 | AAGATACC | 255 | asasgsAUACZUGAAUAACCCUCgUU | 510 |
| PTL3 | | TGAATAAC | | UUAGagcuaGaaauagcaaGUUaAaAuAag | |
| | | CCTC | | gcuaGUccGUUAucAAcuuGaaaaagugGca | |
| | | | | ccgagucggugcusususu | |
| hANG | GA0705 | AAGATACC | 256 | asasgsAZACZUGAAUAACCCUCgUUU | 511 |
| PTL3 | | TGAATAAC | | UAGagcuaGaaauagcaaGUUaAaAuAaggc | |
| | | CCTC | | uaGUccGUUAucAAcuuGaaaaagugGcacc | |
| | | | | gagucggugcusususu | |
| hANG | GA0706 | AAGATACC | 257 | asasgsAUACZUGAAUAACZCUCgUU | 512 |
| PTL3/ | | TGAATAAC | | UUAGagcuaGaaauagcaaGUUaAaAuAag | |
| cANG | | CCTC/AAG | | gcuaGUccGUUAucAAcuuGaaaaagugGca | |
| PTL3 | | ATACCTGA | | ccgagucggugcusususu | |
| | | ATAACTCT | | | |
| | | C | | | |
| hANG | GA0707 | AAGATACC | 258 | asasgsAUACZUGAAZAACZCUCgUUU | 513 |
| PTL3/ | | TGAATAAC | | UAGagcuaGaaauagcaaGUUaAaAuAaggc | |
| cANG | | CCTC/AAG | | uaGUccGUUAucAAcuuGaaaaagugGcacc | |
| PTL3 | | ATACCTGA | | gagucggugcusususu | |
| | | ATAACTCT | | | |
| | | C | | | |
| hANG | GA0708 | AAGATACC | 259 | asasgsAZACCUGAAUAACZCUCgUUU | 514 |
| PTL3/ | | TGAATAAC | | UAGagcuaGaaauagcaaGUUaAaAuAaggc | |
| cANG | | CCTC/AAG | | uaGUccGUUAucAAcuuGaaaaagugGcacc | |
| PTL3 | | ATACCTGA | | gagucggugcusususu | |
| | | ATAACTCT | | | |
| | | C | | | |
| cANG | GA0709 | AAGATACC | 260 | asasgsAdUAdCCdUGdAAdUAdACdUC | 515 |
| PTL3 | | TGAATAAC | | dUCgUUUUAGagcuaGaaauagcaaGUUa | |
| | | TCTC | | AaAuAaggcuaGUccGUUAucAAcuuGaa | |
| | | | | aaagugGcaccgagucggugcusususu | |
| cANG | GA0710 | AAGATACC | 261 | asasgsdAUdACdCUdGAdAUdAAdCUd | 516 |
| PTL3 | | TGAATAAC | | CUdCgUUUUAGagcuaGaaauagcaaGUU | |
| | | TCTC | | aAaAuAaggcuaGUccGUUAucAAcuuGa | |
| | | | | aaaagugGcaccgagucggugcusususu | |
| cANG | GA0711 | AAGATACC | 262 | asdAsdGsdAdUdACdCUdGAdAUdAAd | 517 |
| PTL3 | | TGAATAAC | | CUdCUdCgUUUUAGagcuaGaaauagcaa | |
| | | TCTC | | GUUaAaAuAaggcuaGUccGUUAucAAc | |
| | | | | uuGaaaaagugGcaccgagucggugcusususu | |
| cANG | GA0712 | AAGATACC | 263 | asasdGsdAdUdAdCdCUdGAdAUdAAdC | 518 |
| PTL3 | | TGAATAAC | | UdCUdCgUUUUAGagcuaGaaauagcaaG | |
| | | TCTC | | UUaAaAuAaggcuaGUccGUUAucAAcuu | |
| | | | | GaaaaagugGcaccgagucggugcusususu | |
| cANG | GA0713 | AAGATACC | 264 | asasgsdAdUdACdCUdGAdAUdAAdCUd | 519 |
| PTL3 | | TGAATAAC | | CUdCgUUUUAGagcuaGaaauagcaaGUU | |
| | | TCTC | | aAaAuAaggcuaGUccGUUAucAAcuuGa | |
| | | | | aaaagugGcaccgagucggugcusususu | |
| cANG | GA0714 | AAGATACC | 265 | asasdGsdAdUdAdCdCdUdGdAdAUdAA | 520 |
| PTL3 | | TGAATAAC | | dCUdCUdCgUUUUAGagcuaGaaauagcaa | |
| | | TCTC | | GUUaAaAuAaggcuaGUccGUUAucAAc | |
| | | | | uuGaaaaagugGcaccgagucggugcusususu | |
| cANG | GA0715 | AAGATACC | 266 | asasdGsdAdUdAdCdCdUdGdAdAdUdA | 521 |
| PTL3 | | TGAATAAC | | AdCUdCUdCgUUUUAGagcuaGaaauagc | |
| | | TCTC | | aaGUUaAaAuAaggcuaGUccGUUAucA | |
| | | | | AcuuGaaaaagugGcaccgagucggugcususus | |
| | | | | u | |
| cANG | GA0716 | AAGATACC | 267 | asasdGsdAdUdAdCdCdUdGdAdAdUdA | 522 |
| PTL3 | | TGAATAAC | | dAdCUdCUdCgUUUUAGagcuaGaaauag | |
| | | TCTC | | caaGUUaAaAuAaggcuaGUccGUUAucA | |
| | | | | AcuuGaaaaagugGcaccgagucggugcususus | |
| | | | | u | |
| cANG | GA0716 | AAGATACC | 268 | asasdGsdAdUdAdCdCdUdGdAdAdUdA | 523 |
| PTL3 | | TGAATAAC | | dAdCdUdCUdCgUUUUAGagcuaGaaaua | |
| | | TCTC | | gcaaGUUaAaAuAaggcuaGUccGUUAuc | |
| | | | | AAcuuGaaaaagugGcaccgagucggugcususu | |
| | | | | su | |
| cANG | GA0718 | AAGATACC | 269 | asasdGsdAdUdAdCdCdUdGdAdAdUdA | 524 |
| PTL3 | | TGAATAAC | | dAdCdUdCdUdCgUUUUAGagcuaGaaau | |
| | | TCTC | | agcaaGUUaAaAuAaggcuaGUccGUUAuc | |
| | | | | AAcuuGaaaaagugGcaccgagucggugcususu | |
| | | | | su | |
| cANG | GA0719 | AAGATACC | 270 | asdAsdGsdAdUdAdCdCdUdGdAdAdUd | 525 |
| PTL3 | | TGAATAAC | | AdAdCdUdCdUdCgUUUUAGagcuaGaa | |
| | | TCTC | | auagcaaGUUaAaAuAaggcuaGUccGUUA | |
| | | | | ucAAcuuGaaaaagugGcaccgagucggugcusu | |
| | | | | susu | |
| cANG | GA0720 | AAGATACC | 271 | asasgsdAdUAdCCdUGdAAdUAdACdU | 526 |
| PTL3 | | TGAATAAC | | CdUCgUUUUAGagcuaGaaauagcaaGUU | |
| | | TCTC | | aAaAuAaggcuaGUccGUUAucAAcuuGa | |
| | | | | aaaagugGcaccgagucggugcusususu | |
| cANG | GA0721 | AAGATACC | 272 | asasdGsAdUAdCCdUGdAAdUAdACdU | 527 |
| PTL3 | | TGAATAAC | | CdUCgUUUUAGagcuaGaaauagcaaGUU | |
| | | TCTC | | aAaAuAaggcuaGUccGUUAucAAcuuGa | |
| | | | | aaaagugGcaccgagucggugcusususu | |
| cANG | GA0722 | AAGATACC | 273 | asasdGsdAdUAdCCdUGdAAdUAdACd | 528 |
| PTL3 | | TGAATAAC | | UCdUCgUUUUAGagcuaGaaauagcaaGU | |
| | | TCTC | | UaAaAuAaggcuaGUccGUUAucAAcuuG | |
| | | | | aaaaagugGcaccgagucggugcusususu | |
| cANG | GA0723 | AAGATACC | 274 | asasdGsdAdUdAdCdCdUGdAAdUAdAC | 529 |
| PTL3 | | TGAATAAC | | dUCdUCgUUUUAGagcuaGaaauagcaaG | |
| | | TCTC | | UUaAaAuAaggcuaGUccGUUAucAAcuu | |
| | | | | GaaaaagugGcaccgagucggugcusususu | |
| cANG | GA0724 | AAGATACC | 275 | asasdGsdAdUdAdCdCdUdGdAAdUAdA | 530 |
| PTL3 | | TGAATAAC | | CdUCdUCgUUUUAGagcuaGaaauagcaa | |
| | | TCTC | | GUUaAaAuAaggcuaGUccGUUAucAAc | |
| | | | | uuGaaaaagugGcaccgagucggugcusususu | |
| cANG | GA0725 | AAGATACC | 276 | asasdGsdAdUdAdCdCdUdGdAdAdUAd | 531 |
| PTL3 | | TGAATAAC | | ACdUCdUCgUUUUAGagcuaGaaauagca | |
| | | TCTC | | aGUUaAaAuAaggcuaGUccGUUAucAA | |
| | | | | cuuGaaaaagugGcaccgagucggugcusususu | |
| cANG | GA0726 | AAGATACC | 277 | asasdGsdAdUdAdCdCdUdGdAdAdUdA | 532 |
| PTL3 | | TGAATAAC | | dACdUCdUCgUUUUAGagcuaGaaauagc | |
| | | TCTC | | aaGUUaAaAuAaggcuaGUccGUUAucA | |
| | | | | AcuuGaaaaagugGcaccgagucggugcususus | |
| | | | | u | |
| cANG | GA0727 | AAGATACC | 278 | asasdGsdAdUdAdCdCdUdGdAdAdUdA | 533 |
| PTL3 | | TGAATAAC | | dAdCdUCdUCgUUUUAGagcuaGaaauag | |
| | | TCTC | | caaGUUaAaAuAaggcuaGUccGUUAucA | |
| | | | | AcuuGaaaaagugGcaccgagucggugcususus | |
| | | | | u | |
| cANG | GA0728 | AAGATACC | 279 | asasdGsdAdUdAdCdCdUdGdAdAdUdA | 534 |
| PTL3 | | TGAATAAC | | dAdCdUdCdUCgUUUUAGagcuaGaaaua | |
| | | TCTC | | gcaaGUUaAaAuAaggcuaGUccGUUAuc | |
| | | | | AAcuuGaaaaagugGcaccgagucggugcususu | |
| | | | | su | |
| cANG | GA0729 | AAGATACC | 280 | asasgsdAdUdAdCdCUdGAdAUdAAdCU | 535 |
| PTL3 | | TGAATAAC | | dCUdCgUUUUAGagcuaGaaauagcaaGU | |
| | | TCTC | | UaAaAuAaggcuaGUccGUUAucAAcuuG | |
| | | | | aaaaagugGcaccgagucggugcusususu | |
| cANG | GA0730 | AAGATACC | 281 | asasgsdAdUdAdCdCdUdGAdAUdAAdC | 536 |
| PTL3 | | TGAATAAC | | UdCUdCgUUUUAGagcuaGaaauagcaaG | |
| | | TCTC | | UUaAaAuAaggcuaGUccGUUAucAAcuu | |
| | | | | GaaaaagugGcaccgagucggugcusususu | |
| cANG | GA0731 | AAGATACC | 282 | asasgsdAdUdAdCdCdUdGdAdAUdAAd | 537 |
| PTL3 | | TGAATAAC | | CUdCUdCgUUUUAGagcuaGaaauagcaa | |
| | | TCTC | | GUUaAaAuAaggcuaGUccGUUAucAAc | |
| | | | | uuGaaaaagugGcaccgagucggugcusususu | |
| cANG | GA0732 | AAGATACC | 283 | asasgsdAdUdAdCdCdUdGdAdAdUdAA | 538 |
| PTL3 | | TGAATAAC | | dCUdCUdCgUUUUAGagcuaGaaauagcaa | |
| | | TCTC | | GUUaAaAuAaggcuaGUccGUUAucAAc | |
| | | | | uuGaaaaagugGcaccgagucggugcusususu | |
| cANG | GA0733 | AAGATACC | 284 | asasgsdAdUdAdCdCdUdGdAdAdUdAd | 539 |
| PTL3 | | TGAATAAC | | AdCUdCUdCgUUUUAGagcuaGaaauagc | |
| | | TCTC | | aaGUUaAaAuAaggcuaGUccGUUAucA | |
| | | | | AcuuGaaaaagugGcaccgagucggugcususus | |
| | | | | u | |
| cANG | GA0734 | AAGATACC | 285 | asasgsdAdUdAdCdCdUdGdAdAdUdAd | 540 |
| PTL3 | | TGAATAAC | | AdCdUdCUdCgUUUUAGagcuaGaaauag | |
| | | TCTC | | caaGUUaAaAuAaggcuaGUccGUUAucA | |
| | | | | AcuuGaaaaagugGcaccgagucggugcususus | |
| | | | | u | |
| cANG | GA0735 | AAGATACC | 286 | asasgsdAdUdAdCdCdUdGdAdAdUdAd | 541 |
| PTL3 | | TGAATAAC | | AdCdUdCdUdCgUUUUAGagcuaGaaaua | |
| | | TCTC | | gcaaGUUaAaAuAaggcuaGUccGUUAuc | |
| | | | | AAcuuGaaaaagugGcaccgagucggugcususu | |
| | | | | su | |
| cANG | GA0736 | AAGATACC | 287 | asasgsdAdUdAdCCdUGdAAdUAdACdU | 542 |
| PTL3 | | TGAATAAC | | CdUCgUUUUAGagcuaGaaauagcaaGUU | |
| | | TCTC | | aAaAuAaggcuaGUccGUUAucAAcuuGa | |
| | | | | aaaagugGcaccgagucggugcusususu | |
| cANG | GA0737 | AAGATACC | 288 | asasgsdAdUdAdCdCdUGdAAdUAdACd | 543 |
| PTL3 | | TGAATAAC | | UCdUCgUUUUAGagcuaGaaauagcaaGU | |
| | | TCTC | | UaAaAuAaggcuaGUccGUUAucAAcuuG | |
| | | | | aaaaagugGcaccgagucggugcusususu | |
| cANG | GA0738 | AAGATACC | 289 | asasgsdAdUdAdCdCdUdGdAAdUAdAC | 544 |
| PTL3 | | TGAATAAC | | dUCdUCgUUUUAGagcuaGaaauagcaaG | |
| | | TCTC | | UUaAaAuAaggcuaGUccGUUAucAAcuu | |
| | | | | GaaaaagugGcaccgagucggugcusususu | |
| cANG | GA0739 | AAGATACC | 290 | asasgsdAdUdAdCdCdUdGdAdAdUAdA | 545 |
| PTL3 | | TGAATAAC | | CdUCdUCgUUUUAGagcuaGaaauagcaa | |
| | | TCTC | | GUUaAaAuAaggcuaGUccGUUAucAAc | |
| | | | | uuGaaaaagugGcaccgagucggugcusususu | |
| cANG | GA0742 | AAGATACC | 291 | asasgsdAdUdAdCdCdUdGdAdAdUdAd | 546 |
| PTL3 | | TGAATAAC | | ACdUCdUCgUUUUAGagcuaGaaauagca | |
| | | TCTC | | aGUUaAaAuAaggcuaGUccGUUAucAA | |
| | | | | cuuGaaaaagugGcaccgagucggugcusususu | |
| cANG | GA0743 | AAGATACC | 292 | asasgsdAdUdAdCdCdUdGdAdAdUdAd | 547 |
| PTL3 | | TGAATAAC | | AdCdUCdUCgUUUUAGagcuaGaaauagc | |
| | | TCTC | | aaGUUaAaAuAaggcuaGUccGUUAucA | |
| | | | | AcuuGaaaaagugGcaccgagucggugcususus | |
| | | | | u | |
| cANG | GA0744 | AAGATACC | 293 | asasgsdAdUdAdCdCdUdGdAdAdUdAd | 548 |
| PTL3 | | TGAATAAC | | AdCdUdCdUCgUUUUAGagcuaGaaauag | |
| | | TCTC | | caaGUUaAaAuAaggcuaGUccGUUAucA | |
| | | | | AcuuGaaaaagugGcaccgagucggugcususus | |
| | | | | u | |
| cANG | GA0745 | AAGATACC | 294 | asasgsAdUACCUGAAUAdACUCUCgU | 549 |
| PTL3 | | TGAATAAC | | UUUAGagcuaGaaauagcaaGUUaAaAuAa | |
| | | TCTC | | ggcuaGUccGUUAucAAcuuGaaaaagugG | |
| | | | | caccgagucggugcusususu | |
| cANG | GA0746 | AAGATACC | 295 | asasgsAUdACCUGAAUAAdCUCUCgU | 550 |
| PTL3 | | TGAATAAC | | UUUAGagcuaGaaauagcaaGUUaAaAuAa | |
| | | TCTC | | ggcuaGUccGUUAucAAcuuGaaaaagugG | |
| | | | | caccgagucggugcusususu | |
| cANG | GA753 | AAGATACC | 296 | asasgsAUACCUdGAAdUAACUdCUCg | 551 |
| PTL3 | | TGAATAAC | | UUUUAGagcuaGaaauagcaaGUUaAaAu | |
| | | TCTC | | AaggcuaGUccGUUAucAAcuuGaaaaagu | |
| | | | | gGcaccgagucggugcusususu | |
| cANG | GA0748 | AAGATACC | 297 | asasgsdAdUdACCUGAAUAACUCUCg | 552 |
| PTL3 | | TGAATAAC | | UUUUAGagcuaGaaauagcaaGUUaAaAu | |
| | | TCTC | | AaggcuaGUccGUUAucAAcuuGaaaaagu | |
| | | | | gGcaccgagucggugcusususu | |
| cANG | GA0749 | AAGATACC | 298 | asasdGsdAdUdACCUGAAUAACUCUC | 553 |
| PTL3 | | TGAATAAC | | gUUUUAGagcuaGaaauagcaaGUUaAaAu | |
| | | TCTC | | AaggcuaGUccGUUAucAAcuuGaaaaagu | |
| | | | | gGcaccgagucggugcusususu | |
| cANG | GA0750 | AAGATACC | 299 | asasgsdAdUdAdCCUGAAUAACUCUC | 554 |
| PTL3 | | TGAATAAC | | gUUUUAGagcuaGaaauagcaaGUUaAaAu | |
| | | TCTC | | AaggcuaGUccGUUAucAAcuuGaaaaagu | |
| | | | | gGcaccgagucggugcusususu | |
| cANG | GA746 | AAGATACC | 300 | asasdGsdAdUdAdCCUGAAUAACUCU | 555 |
| PTL3 | | TGAATAAC | | CgUUUUAGagcuaGaaauagcaaGUUaAa | |
| | | TCTC | | AuAaggcuaGUccGUUAucAAcuuGaaaaa | |
| | | | | gugGcaccgagucggugcusususu | |
| cANG | GA0752 | AAGATACC | 301 | asasgsdAdUdAdCdCUGAAUAACUCU | 556 |
| PTL3 | | TGAATAAC | | CgUUUUAGagcuaGaaauagcaaGUUaAa | |
| | | TCTC | | AuAaggcuaGUccGUUAucAAcuuGaaaaa | |
| | | | | gugGcaccgagucggugcusususu | |
| cANG | GA0753 | AAGATACC | 302 | asasdGsdAdUdAdCdCUGAAUAACUC | 557 |
| PTL3 | | TGAATAAC | | UCgUUUUAGagcuaGaaauagcaaGUUaA | |
| | | TCTC | | aAuAaggcuaGUccGUUAucAAcuuGaaaa | |
| | | | | agugGcaccgagucggugcusususu | |
| cANG | GA0754 | AAGATACC | 303 | asasgsAZACCUGAAUAACUCUCgUU | 558 |
| PTL3 | | TGAATAAC | | UUAGagcuaGaaauagcaaGUUaAaAuAag | |
| | | TCTC | | gcuaGUccGUUAucAAcuuGaaaaagugGca | |
| | | | | ccgagucggugcusususu | |
| cANG | GA0755 | AAGATACC | 304 | asasgsAUACZUGAAUAACUCUCgUU | 559 |
| PTL3 | | TGAATAAC | | UUAGagcuaGaaauagcaaGUUaAaAuAag | |
| | | TCTC | | gcuaGUccGUUAucAAcuuGaaaaagugGca | |
| | | | | ccgagucggugcusususu | |
| cANG | GA0756 | AAGATACC | 305 | asasgsAZACZUGAAUAACUCUCgUU | 560 |
| PTL3 | | TGAATAAC | | UUAGagcuaGaaauagcaaGUUaAaAuAag | |
| | | TCTC | | gcuaGUccGUUAucAAcuuGaaaaagugGca | |
| | | | | ccgagucggugcusususu | |
| cANG | GA0757 | AAGATACC | 306 | asasgsAZACCZGAAUAACUCUCgUUU | 561 |
| PTL3 | | TGAATAAC | | UAGagcuaGaaauagcaaGUUaAaAuAaggc | |
| | | TCTC | | uaGUccGUUAucAAcuuGaaaaagugGcacc | |
| | | | | gagucggugcusususu | |
| hANG | GA0758 | AAGATACC | 307 | asasgsAUACCUGAAYAACCCUCguuuu | 562 |
| PTL3 | | TGAATAAC | | agagcuagaaauagcaaguuaaaauaaggcuagucc | |
| | | CCTC | | guuaucaacuugaaaaaguggcaccgagucggugc | |
| | | | | usususu | |
| hANG | GA0759 | AAGATACC | 308 | asasgsAUACCUGAA(N1mY)AACCCU | 563 |
| PTL3 | | TGAATAAC | | Cguuuuagagcuagaaauagcaaguuaaaauaagg | |
| | | CCTC | | cuaguccguuaucaacuugaaaaaguggcaccgagu | |
| | | | | cggugcusususu | |
| hANG | GA0760 | AAGATACC | 309 | asasgsAUACCUGAAdWAACCCUCguu | 564 |
| PTL3 | | TGAATAAC | | uuagagcuagaaauagcaaguuaaaauaaggcuagu | |
| | | CCTC | | ccguuaucaacuugaaaaaguggcaccgagucggug | |
| | | | | cusususu | |
| hANG | GA0761 | AAGATACC | 310 | asasgsAUACCUGAATAACCCUCguuuu | 565 |
| PTL3 | | TGAATAAC | | agagcuagaaauagcaaguuaaaauaaggcuagucc | |
| | | CCTC | | guuaucaacuugaaaaaguggcaccgagucggugc | |
| | | | | usususu | |
| hANG | GA0762 | AAGATACC | 311 | asasgsAUACCYGAAUAACCCUCguuuu | 566 |
| PTL3 | | TGAATAAC | | agagcuagaaauagcaaguuaaaauaaggcuagucc | |
| | | CCTC | | guuaucaacuugaaaaaguggcaccgagucggugc | |
| | | | | usususu | |
| hANG | GA0763 | AAGATACC | 312 | asasgsAUACC(N1mY)GAAUAACCCU | 567 |
| PTL3 | | TGAATAAC | | Cguuuuagagcuagaaauagcaaguuaaaauaagg | |
| | | CCTC | | cuaguccguuaucaacuugaaaaaguggcaccgagu | |
| | | | | cggugcusususu | |
| hANG | GA0764 | AAGATACC | 313 | asasgsAUACCdWGAAUAACCCUCguu | 568 |
| PTL3 | | TGAATAAC | | uuagagcuagaaauagcaaguuaaaauaaggcuagu | |
| | | CCTC | | ccguuaucaacuugaaaaaguggcaccgagucggug | |
| | | | | cusususu | |
| hANG | GA0765 | AAGATACC | 314 | asasgsAUACCTdUGAAUAACCCUCgu | 569 |
| PTL3 | | TGAATAAC | | uuuagagcuagaaauagcaaguuaaaauaaggcuag | |
| | | CCTC | | uccguuaucaacuugaaaaaguggcaccgagucggu | |
| | | | | gcusususu | |
| hANG | GA0766 | AAGATACC | 315 | asasgsAUACCYGAAYAACCCUCguuuu | 570 |
| PTL3 | | TGAATAAC | | agagcuagaaauagcaaguuaaaauaaggcuagucc | |
| | | CCTC | | guuaucaacuugaaaaaguggcaccgagucggugc | |
| | | | | usususu | |
| hANG | GA0767 | AAGATACC | 316 | asasgsAUACC(N1mY)GAA(N1mY)AA | 571 |
| PTL3 | | TGAATAAC | | CCCUCguuuuagagcuagaaauagcaaguuaaa | |
| | | CCTC | | auaaggcuaguccguuaucaacuugaaaaaguggca | |
| | | | | ccgagucggugcusususu | |
| hANG | GA0768 | AAGATACC | 317 | asasgsAUACCdWGAAdWAACCCUCgu | 572 |
| PTL3 | | TGAATAAC | | uuuagagcuagaaauagcaaguuaaaauaaggcuag | |
| | | CCTC | | uccguuaucaacuugaaaaaguggcaccgagucggu | |
| | | | | gcusususu | |
| hANG | GA0769 | AAGATACC | 318 | asasgsAUACCTdUGAATdUAACCCUC | 573 |
| PTL3 | | TGAATAAC | | guuuuagagcuagaaauagcaaguuaaaauaaggcu | |
| | | CCTC | | aguccguuaucaacuugaaaaaguggcaccgagucg | |
| | | | | gugcusususu | |
| hANG | GA0770 | AAGATACC | 319 | asasgsAUACCUGA(2,6- | 574 |
| PTL3 | | TGAATAAC | | DAP)UAACCCUCguuuuagagcuagaaauag | |
| | | CCTC | | caaguuaaaauaaggcuaguccguuaucaacuugaa | |
| | | | | aaaguggcaccgagucggugcusususu | |
| hANG | GA0771 | AAGATACC | 320 | asasgsAUACCUGAAU(2,6- | 575 |
| PTL3 | | TGAATAAC | | DAP)ACCCUCguuuuagagcuagaaauagcaa | |
| | | CCTC | | guuaaaauaaggcuaguccguuaucaacuugaaaaa | |
| | | | | guggcaccgagucggugcusususu | |
| hANG | GA0772 | AAGATACC | 321 | asasgsAUACCUGA(2,6-DAP)U(2,6- | 576 |
| PTL3 | | TGAATAAC | | DAP)ACCCUCguuuuagagcuagaaauagcaa | |
| | | CCTC | | guuaaaauaaggcuaguccguuaucaacuugaaaaa | |
| | | | | guggcaccgagucggugcusususu | |
| hANG | GA0773 | AAGATACC | 322 | asasgsAUACCUGAAdUAACCCUCguuu | 577 |
| PTL3 | | TGAATAAC | | uagagcuagaaauagcaaguuaaaauaaggcuaguc | |
| | | CCTC | | cguuaucaacuugaaaaaguggcaccgagucggugc | |
| | | | | usususu | |
| hANG | GA0774 | AAGATACC | 323 | asasgsAUACCUGAAdUAACCCUCguuu | 578 |
| PTL3 | | TGAATAAC | | uagagcuagaaauagcaaguuaaaauaaggcuaguc | |
| | | CCTC | | cguuaucaacuugaaaaaguggcaccgagucggugc | |
| | | | | usususu | |
| hANG | GA0775 | AAGATACC | 324 | asasgsAdUACCUGAAdUAACCCUCguu | 579 |
| PTL3 | | TGAATAAC | | uuagagcuagaaauagcaaguuaaaauaaggcuagu | |
| | | CCTC | | ccguuaucaacuugaaaaaguggcaccgagucggug | |
| | | | | cusususu | |
| hANG | GA0776 | AAGATACC | 325 | asasgsAUACCUdGAAUAACCCUCguuu | 580 |
| PTL3 | | TGAATAAC | | uagagcuagaaauagcaaguuaaaauaaggcuaguc | |
| | | CCTC | | cguuaucaacuugaaaaaguggcaccgagucggugc | |
| | | | | usususu | |
| hANG | GA0777 | AAGATACC | 326 | +As+As+GsAUACCUGAAUAACCCUC | 581 |
| PTL3 | | TGAATAAC | | guuuuagagcuagaaauagcaaguuaaaauaaggcu | |
| | | CCTC | | aguccguuaucaacuugaaaaaguggcaccgagucg | |
| | | | | gugcusususu | |
| hANG | GA0778 | AAGATACC | 327 | asasgsAU+A+CCUGAAUAACCCUCgu | 582 |
| PTL3 | | TGAATAAC | | uuuagagcuagaaauagcaaguuaaaauaaggcuag | |
| | | CCTC | | uccguuaucaacuugaaaaaguggcaccgagucggu | |
| | | | | gcusususu | |
| hANG | GA0779 | AAGATACC | 328 | asasgsdAUACCUGAAUAACCCUCguuu | 583 |
| PTL3 | | TGAATAAC | | uagagcuagaaauagcaaguuaaaauaaggcuaguc | |
| | | CCTC | | cguuaucaacuugaaaaaguggcaccgagucggugc | |
| | | | | usususu | |
| hANG | GA0780 | AAGATACC | 329 | asasgsAdUACCUGAAUAACCCUCguuu | 584 |
| PTL3 | | TGAATAAC | | uagagcuagaaauagcaaguuaaaauaaggcuaguc | |
| | | CCTC | | cguuaucaacuugaaaaaguggcaccgagucggugc | |
| | | | | usususu | |
| hANG | GA0781 | AAGATACC | 330 | asasgsAUdACCUGAAUAACCCUCguuu | 585 |
| PTL3 | | TGAATAAC | | uagagcuagaaauagcaaguuaaaauaaggcuaguc | |
| | | CCTC | | cguuaucaacuugaaaaaguggcaccgagucggugc | |
| | | | | usususu | |
| hANG | GA0782 | AAGATACC | 331 | asasgsAUAdCCUGAAUAACCCUCguuu | 586 |
| PTL3 | | TGAATAAC | | uagagcuagaaauagcaaguuaaaauaaggcuaguc | |
| | | CCTC | | cguuaucaacuugaaaaaguggcaccgagucggugc | |
| | | | | usususu | |
| hANG | GA0783 | AAGATACC | 332 | asasgsAUACCdUGAAUAACCCUCguuu | 587 |
| PTL3 | | TGAATAAC | | uagagcuagaaauagcaaguuaaaauaaggcuaguc | |
| | | CCTC | | cguuaucaacuugaaaaaguggcaccgagucggugc | |
| | | | | usususu | |
| hANG | GA0784 | AAGATACC | 333 | asasgsAUACCUGAAUdAACCCUCguuu | 588 |
| PTL3 | | TGAATAAC | | uagagcuagaaauagcaaguuaaaauaaggcuaguc | |
| | | CCTC | | cguuaucaacuugaaaaaguggcaccgagucggugc | |
| | | | | usususu | |
| hANG | GA0785 | AAGATACC | 334 | asasgsAUACCUIAAUAACCCUCguuuu | 589 |
| PTL3 | | TGAATAAC | | agagcuagaaauagcaaguuaaaauaaggcuagucc | |
| | | CCTC | | guuaucaacuugaaaaaguggcaccgagucggugc | |
| | | | | usususu | |
| hANG | GA0786 | AAGATACC | 335 | asasgsAUACC(MP- | 590 |
| PTL3 | | TGAATAAC | | U)GAAUAACCCUCguuuuagagcuagaaau | |
| | | CCTC | | agcaaguuaaaauaaggcuaguccguuaucaacuug | |
| | | | | aaaaaguggcaccgagucggugcusususu | |
| hANG | GA0787 | AAGATACC | 336 | asasgsAUACCUGAA(MP- | 591 |
| PTL3 | | TGAATAAC | | U)AACCCUCguuuuagagcuagaaauagcaag | |
| | | CCTC | | uuaaaauaaggcuaguccguuaucaacuugaaaaag | |
| | | | | uggcaccgagucggugcusususu | |
| hANG | GA0788 | AAGATACC | 337 | asasgsAUACC(MP-U)GAA(MP- | 592 |
| PTL3 | | TGAATAAC | | U)AACCCUCguuuuagagcuagaaauagcaag | |
| | | CCTC | | uuaaaauaaggcuaguccguuaucaacuugaaaaag | |
| | | | | uggcaccgagucggugcusususu | |
| hANG | GA472 | AAGATACC | 338 | asasisAUACCUGAAUAACCCUCgUUU | 593 |
| PTL3 | | TGAATAAC | | UAGagcuaGaaauagcaaGUUaAaAuAaggc | |
| | | CCTC | | uaGUccGUUAucAAcuuGaaaaagugGcacc | |
| | | | | gagucggugcusususu | |
| hANG | GA473 | AAGATACC | 339 | asasisAUACCUIAAUAACCCUCgUUU | 594 |
| PTL3 | | TGAATAAC | | UAGagcuaGaaauagcaaGUUaAaAuAaggc | |
| | | CCTC | | uaGUccGUUAucAAcuuGaaaaagugGcacc | |
| | | | | gagucggugcusususu | |
| hANG | GA631 | AAGATACC | 340 | asdAsgsdAdUdAdCdCUGdAdAUAACC | 595 |
| PTL3 | | TGAATAAC | | CUCgUUUUAGagcuaGaaauagcaaGUUa | |
| | | CCTC | | AaAuAaggcuaGUccGUUAucAAcuuGaa | |
| | | | | aaagugGcaccgagucggugcusususu | |
| hANG | GA633 | AAGATACC | 341 | dAsdAsgsadUdAdCdCdUdGdAAUdAA | 596 |
| PTL3 | | TGAATAAC | | CdCCUCgUUUUAGagcuaGaaauagcaaG | |
| | | CCTC | | UUaAaAuAaggcuaGUccGUUAucAAcuu | |
| | | | | GaaaaagugGcaccgagucggugcusususu | |
| hANG | GA635 | AAGATACC | 342 | dAsdAsgsadUdAdCdCdUdGdAAUdAAd | 597 |
| PTL3 | | TGAATAAC | | CdCdCUCgUUUUAGagcuaGaaauagcaa | |
| | | CCTC | | GUUaAaAuAaggcuaGUccGUUAucAAc | |
| | | | | uuGaaaaagugGcaccgagucggugcusususu | |
| hANG | GA636 | AAGATACC | 343 | asasdGsdAdUdAdCdCUGAAUAACCC | 598 |
| PTL3 | | TGAATAAC | | UCgUUUUAGagcuaGaaauagcaaGUUaA | |
| | | CCTC | | aAuAaggcuaGUccGUUAucAAcuuGaaaa | |
| | | | | agugGcaccgagucggugcusususu | |
| hANG | GA722 | AAGATACC | 344 | asdAsgsadUdAdCdCdUdGdAAUdAAdC | 599 |
| PTL3 | | TGAATAAC | | dCdCUCgUUUUAGagcuaGaaauagcaaG | |
| | | CCTC | | UUaAaAuAaggcuaGUccGUUAucAAcuu | |
| | | | | GaaaaagugGcaccgagucggugcusususu | |
| hANG | GA672 | AAGATACC | 345 | asasgsAUACCUGAAZAACZCUCgUUU | 600 |
| PTL3/c | | TGAATAAC | | UAGagcuaGaaauagcaaGUUaAaAuAaggc | |
| ANGP | | CCTC/AAG | | uaGUccGUUAucAAcuuGaaaaagugGcacc | |
| TL3 | | ATACCTGA | | gagucggugcusususu | |
| | | ATAACTCT | | | |
| | | C | | | |
| hANG | GA675 | AAGATACC | 346 | asdAsgsadUdAdCdCdUdGdAAUdAAdC | 601 |
| PTL3 | | TGAATAAC | | dCdCUCGUUUUAGAGCUAGAAAUA | |
| | | CCTC | | GCAAGUUAAAAUAAGGCUAGUCC | |
| | | | | GUUAUCAACUUGAAAAAGUGGCA | |
| | | | | CCGAGUCGGUGCUsususu | |
| hANG | GA676 | AAGATACC | 347 | asasdGsdAdUdAdCdCdUdGAdAUdAAd | 602 |
| PTL3 | | TGAATAAC | | CCdCUdCGUUUUAGAGCUAGAAAU | |
| | | CCTC | | AGCAAGUUAAAAUAAGGCUAGUC | |
| | | | | CGUUAUCAACUUGAAAAAGUGGC | |
| | | | | ACCGAGUCGGUGCUsususu | |
| hANG | GA677 | AAGATACC | 348 | asasdGsdAdUdACdCUdGAdAUdAAdC | 603 |
| PTL3 | | TGAATAAC | | CdCUdCGUUUUAGAGCUAGAAAUA | |
| | | CCTC | | GCAAGUUAAAAUAAGGCUAGUCC | |
| | | | | GUUAUCAACUUGAAAAAGUGGCA | |
| | | | | CCGAGUCGGUGCUsususu | |
| hANG | GA678 | AAGATACC | 349 | asdAsdGsdAdTdAdCdCdTdGAAUAAC | 604 |
| PTL3 | | TGAATAAC | | CCUCGUUUUAGAGCUAGAAAUAG | |
| | | CCTC | | CAAGUUAAAAUAAGGCUAGUCCG | |
| | | | | UUAUCAACUUGAAAAAGUGGCAC | |
| | | | | CGAGUCGGUGCUsususu | |
| hANG | GA679 | AAGATACC | 350 | dAsdAsdGsdAdUdACdCdUdGdAAUAA | 605 |
| PTL3 | | TGAATAAC | | CCCUCGUUUUAGAGCUAGAAAUA | |
| | | CCTC | | GCAAGUUAAAAUAAGGCUAGUCC | |
| | | | | GUUAUCAACUUGAAAAAGUGGCA | |
| | | | | CCGAGUCGGUGCUsususu | |
| hANG | GA680 | AAGATACC | 351 | asasgsAUAdCCdUGAAdUAACCCUCG | 606 |
| PTL3 | | TGAATAAC | | UUUUAGAGCUAGAAAUAGCAAGU | |
| | | CCTC | | UAAAAUAAGGCUAGUCCGUUAUC | |
| | | | | AACUUGAAAAAGUGGCACCGAGU | |
| | | | | CGGUGCUsususu | |
| hANG | GA681 | AAGATACC | 352 | asdAsdGsdAdUdAdCdCdUdGAdAUdA | 607 |
| PTL3 | | TGAATAAC | | AdCCdCUdCGUUUUAGAGCUAGAA | |
| | | CCTC | | AUAGCAAGUUAAAAUAAGGCUAG | |
| | | | | UCCGUUAUCAACUUGAAAAAGUG | |
| | | | | GCACCGAGUCGGUGCUsususu | |
| hANG | GA682 | AAGATACC | 353 | asasdGsdAdUdAdCCUGAAUAACCCU | 608 |
| PTL3 | | TGAATAAC | | CGUUUUAGAGCUAGAAAUAGCAA | |
| | | CCTC | | GUUAAAAUAAGGCUAGUCCGUUA | |
| | | | | UCAACUUGAAAAAGUGGCACCGA | |
| | | | | GUCGGUGCUsususu | |
| hANG | GA683 | AAGATACC | 354 | dAsdAsgsadUdAdCdCdUdGdAAUdAAd | 609 |
| PTL3 | | TGAATAAC | | CdCdCUCGUUUUAGAGCUAGAAAU | |
| | | CCTC | | AGCAAGUUAAAAUAAGGCUAGUC | |
| | | | | CGUUAUCAACUUGAAAAAGUGGC | |
| | | | | ACCGAGUCGGUGCUsususu | |
| hANG | GA684 | AAGATACC | 355 | asasdGsdAdUdAdCdCUGAAUAACCC | 610 |
| PTL3 | | TGAATAAC | | UCGUUUUAGAGCUAGAAAUAGCA | |
| | | CCTC | | AGUUAAAAUAAGGCUAGUCCGUU | |
| | | | | AUCAACUUGAAAAAGUGGCACCG | |
| | | | | AGUCGGUGCUsususu | |
| hANG | GA685 | AAGATACC | 356 | asasgsAdUAdCCdUGdAAdUAdACdCC | 611 |
| PTL3 | | TGAATAAC | | dUCGUUUUAGAGCUAGAAAUAGCA | |
| | | CCTC | | AGUUAAAAUAAGGCUAGUCCGUU | |
| | | | | AUCAACUUGAAAAAGUGGCACCG | |
| | | | | AGUCGGUGCUsususu | |
| hANG | GA686 | AAGATACC | 357 | asasdGsdAdUdAdCdCdUGAAUAACCC | 612 |
| PTL3 | | TGAATAAC | | UCGUUUUAGAGCUAGAAAUAGCA | |
| | | CCTC | | AGUUAAAAUAAGGCUAGUCCGUU | |
| | | | | AUCAACUUGAAAAAGUGGCACCG | |
| | | | | AGUCGGUGCUsususu | |
| hANG | GA687 | AAGATACC | 358 | asasgsdAdUdAdCdCdUdGAAUAACCC | 613 |
| PTL3 | | TGAATAAC | | UCGUUUUAGAGCUAGAAAUAGCA | |
| | | CCTC | | AGUUAAAAUAAGGCUAGUCCGUU | |
| | | | | AUCAACUUGAAAAAGUGGCACCG | |
| | | | | AGUCGGUGCUsususu | |
| hANG | GA688 | AAGATACC | 359 | asasdGsdAdUdAdCdCdUdGAAUAACC | 614 |
| PTL3 | | TGAATAAC | | CUCGUUUUAGAGCUAGAAAUAGC | |
| | | CCTC | | AAGUUAAAAUAAGGCUAGUCCGU | |
| | | | | UAUCAACUUGAAAAAGUGGCACC | |
| | | | | GAGUCGGUGCUsususu | |
| hANG | GA689 | AAGATACC | 360 | asasgsAUdACCUGAAUAAdCCCUCGU | 615 |
| PTL3 | | TGAATAAC | | UUUAGAGCUAGAAAUAGCAAGUU | |
| | | CCTC | | AAAAUAAGGCUAGUCCGUUAUCA | |
| | | | | ACUUGAAAAAGUGGCACCGAGUC | |
| | | | | GGUGCUsususu | |
| hANG | GA690 | AAGATACC | 361 | asasgsAUACCUdGAAdUAACCdCUCG | 616 |
| PTL3 | | TGAATAAC | | UUUUAGAGCUAGAAAUAGCAAGU | |
| | | CCTC | | UAAAAUAAGGCUAGUCCGUUAUC | |
| | | | | AACUUGAAAAAGUGGCACCGAGU | |
| | | | | CGGUGCUsususu | |
| hANG | GA691 | AAGATACC | 362 | asasgsdAdUdAdCCdUdGAAdUdAACC | 617 |
| PTL3 | | TGAATAAC | | CUCGUUUUAGAGCUAGAAAUAGC | |
| | | CCTC | | AAGUUAAAAUAAGGCUAGUCCGU | |
| | | | | UAUCAACUUGAAAAAGUGGCACC | |
| | | | | GAGUCGGUGCUsususu | |
| hANG | GA692 | AAGATACC | 363 | asasdGsdAUdAdCCUGAAUAACCCUC | 618 |
| PTL3 | | TGAATAAC | | GUUUUAGAGCUAGAAAUAGCAAG | |
| | | CCTC | | UUAAAAUAAGGCUAGUCCGUUAU | |
| | | | | CAACUUGAAAAAGUGGCACCGAG | |
| | | | | UCGGUGCUsususu | |
| hANG | GA693 | AAGATACC | 364 | asasdGsdAUdAdCdCUGAAUAACCCU | 619 |
| PTL3 | | TGAATAAC | | CGUUUUAGAGCUAGAAAUAGCAA | |
| | | CCTC | | GUUAAAAUAAGGCUAGUCCGUUA | |
| | | | | UCAACUUGAAAAAGUGGCACCGA | |
| | | | | GUCGGUGCUsususu | |
| hANG | GA694 | AAGATACC | 365 | asasdGsdAUdAdCdCdUGAAUAACCC | 620 |
| PTL3 | | TGAATAAC | | UCGUUUUAGAGCUAGAAAUAGCA | |
| | | CCTC | | AGUUAAAAUAAGGCUAGUCCGUU | |
| | | | | AUCAACUUGAAAAAGUGGCACCG | |
| | | | | AGUCGGUGCUsususu | |
| hANG | GA695 | AAGATACC | 366 | asasdGsdAUdAdCdCdUdGAAUAACCC | 621 |
| PTL3 | | TGAATAAC | | UCGUUUUAGAGCUAGAAAUAGCA | |
| | | CCTC | | AGUUAAAAUAAGGCUAGUCCGUU | |
| | | | | AUCAACUUGAAAAAGUGGCACCG | |
| | | | | AGUCGGUGCUsususu | |
| hANG | GA696 | AAGATACC | 367 | asasdGsdAUAdCdCdUGAAUAACCCU | 622 |
| PTL3 | | TGAATAAC | | CGUUUUAGAGCUAGAAAUAGCAA | |
| | | CCTC | | GUUAAAAUAAGGCUAGUCCGUUA | |
| | | | | UCAACUUGAAAAAGUGGCACCGA | |
| | | | | GUCGGUGCUsususu | |
| hANG | GA697 | AAGATACC | 368 | asasdGsdAUAdCdCdUdGAAUAACCC | 623 |
| PTL3 | | TGAATAAC | | UCGUUUUAGAGCUAGAAAUAGCA | |
| | | CCTC | | AGUUAAAAUAAGGCUAGUCCGUU | |
| | | | | AUCAACUUGAAAAAGUGGCACCG | |
| | | | | AGUCGGUGCUsususu | |
| hANG | GA698 | AAGATACC | 369 | asasdGsAdUAdCCdUGAAUAACCCUC | 624 |
| PTL3 | | TGAATAAC | | GUUUUAGAGCUAGAAAUAGCAAG | |
| | | CCTC | | UUAAAAUAAGGCUAGUCCGUUAU | |
| | | | | CAACUUGAAAAAGUGGCACCGAG | |
| | | | | UCGGUGCUsususu | |
| hANG | GA699 | AAGATACC | 370 | asasgsdAUdACdCUdGAAUAACCCUC | 625 |
| PTL3 | | TGAATAAC | | GUUUUAGAGCUAGAAAUAGCAAG | |
| | | CCTC | | UUAAAAUAAGGCUAGUCCGUUAU | |
| | | | | CAACUUGAAAAAGUGGCACCGAG | |
| | | | | UCGGUGCUsususu | |
| hANG | GA700 | AAGATACC | 371 | asasgsAUACCdUGAAdUAACCCUCGU | 626 |
| PTL3 | | TGAATAAC | | UUUAGAGCUAGAAAUAGCAAGUU | |
| | | CCTC | | AAAAUAAGGCUAGUCCGUUAUCA | |
| | | | | ACUUGAAAAAGUGGCACCGAGUC | |
| | | | | GGUGCUsususu | |
| hANG | GA701 | AAGATACC | 372 | asasgsdAUdACdCUdGAdAUdAAdCCd | 627 |
| PTL3 | | TGAATAAC | | CUdCGUUUUAGAGCUAGAAAUAGC | |
| | | CCTC | | AAGUUAAAAUAAGGCUAGUCCGU | |
| | | | | UAUCAACUUGAAAAAGUGGCACC | |
| | | | | GAGUCGGUGCUsususu | |
| hANG | GA702 | AAGATACC | 373 | asasgsAUACCUGAdAUdAACCCUCGU | 628 |
| PTL3 | | TGAATAAC | | UUUAGAGCUAGAAAUAGCAAGUU | |
| | | CCTC | | AAAAUAAGGCUAGUCCGUUAUCA | |
| | | | | ACUUGAAAAAGUGGCACCGAGUC | |
| | | | | GGUGCUsususu | |
| hANG | GA703 | AAGATACC | 374 | asasdGsAUAdCCUGAdAUdAACCCUC | 629 |
| PTL3 | | TGAATAAC | | GUUUUAGAGCUAGAAAUAGCAAG | |
| | | CCTC | | UUAAAAUAAGGCUAGUCCGUUAU | |
| | | | | CAACUUGAAAAAGUGGCACCGAG | |
| | | | | UCGGUGCUsususu | |
| hANG | GA704 | AAGATACC | 375 | dAsdAsdGsdAdUdAdCdCdUdGAAUAA | 630 |
| PTL3 | | TGAATAAC | | CCCUCGUUUUAGAGCUAGAAAUA | |
| | | CCTC | | GCAAGUUAAAAUAAGGCUAGUCC | |
| | | | | GUUAUCAACUUGAAAAAGUGGCA | |
| | | | | CCGAGUCGGUGCUsususu | |
| hANG | GA705 | AAGATACC | 376 | asasgsdAdUdACdCdUdGdAAUAACCC | 631 |
| PTL3 | | TGAATAAC | | UCGUUUUAGAGCUAGAAAUAGCA | |
| | | CCTC | | AGUUAAAAUAAGGCUAGUCCGUU | |
| | | | | AUCAACUUGAAAAAGUGGCACCG | |
| | | | | AGUCGGUGCUsususu | |
| hANG | GA706 | AAGATACC | 377 | asdAsgsdAdUdAdCdCUGdAdAUAACC | 632 |
| PTL3 | | TGAATAAC | | CUCGUUUUAGAGCUAGAAAUAGC | |
| | | CCTC | | AAGUUAAAAUAAGGCUAGUCCGU | |
| | | | | UAUCAACUUGAAAAAGUGGCACC | |
| | | | | GAGUCGGUGCUsususu | |
| hANG | GA707 | AAGATACC | 378 | asasdGsdAdUdACdCdUdGdAAUAACC | 633 |
| PTL3 | | TGAATAAC | | CUCGUUUUAGAGCUAGAAAUAGC | |
| | | CCTC | | AAGUUAAAAUAAGGCUAGUCCGU | |
| | | | | UAUCAACUUGAAAAAGUGGCACC | |
| | | | | GAGUCGGUGCUsususu | |
| hANG | GA708 | AAGATACC | 379 | asasgsdAdUdAdCCUGAdAdUAACCCU | 634 |
| PTL3 | | TGAATAAC | | dCGUUUUAGAGCUAGAAAUAGCAA | |
| | | CCTC | | GUUAAAAUAAGGCUAGUCCGUUA | |
| | | | | UCAACUUGAAAAAGUGGCACCGA | |
| | | | | GUCGGUGCUsususu | |
| hANG | GA709 | AAGATACC | 380 | dAsasgsdAdUdAdCCUGAdAdUAACCC | 635 |
| PTL3 | | TGAATAAC | | UdCGUUUUAGAGCUAGAAAUAGCA | |
| | | CCTC | | AGUUAAAAUAAGGCUAGUCCGUU | |
| | | | | AUCAACUUGAAAAAGUGGCACCG | |
| | | | | AGUCGGUGCUsususu | |
| hANG | GA710 | AAGATACC | 381 | dAsasgsdAdUAdCdCdUdGdAAdUAAC | 636 |
| PTL3 | | TGAATAAC | | dCCUCGUUUUAGAGCUAGAAAUAG | |
| | | CCTC | | CAAGUUAAAAUAAGGCUAGUCCG | |
| | | | | UUAUCAACUUGAAAAAGUGGCAC | |
| | | | | CGAGUCGGUGCUsususu | |
| hANG | GA711 | AAGATACC | 382 | asasgsdAdUAdCdCdUdGdAAdUAACdC | 637 |
| PTL3 | | TGAATAAC | | CUCGUUUUAGAGCUAGAAAUAGC | |
| | | CCTC | | AAGUUAAAAUAAGGCUAGUCCGU | |
| | | | | UAUCAACUUGAAAAAGUGGCACC | |
| | | | | GAGUCGGUGCUsususu | |
| hANG | GA712 | AAGATACC | 383 | asasdGsdAdUdACCUGAAUAACCCUC | 638 |
| PTL3 | | TGAATAAC | | GUUUUAGAGCUAGAAAUAGCAAG | |
| | | CCTC | | UUAAAAUAAGGCUAGUCCGUUAU | |
| | | | | CAACUUGAAAAAGUGGCACCGAG | |
| | | | | UCGGUGCUsususu | |
| hANG | GA713 | AAGATACC | 384 | asdAsdGsdAdUdACdCUdGAdAUdAAd | 639 |
| PTL3 | | TGAATAAC | | CCdCUdCGUUUUAGAGCUAGAAAU | |
| | | CCTC | | AGCAAGUUAAAAUAAGGCUAGUC | |
| | | | | CGUUAUCAACUUGAAAAAGUGGC | |
| | | | | ACCGAGUCGGUGCUsususu | |
| hANG | GA714 | AAGATACC | 385 | dAsdAsgsadUdAdCdCdUdGdAAUdAAd | 640 |
| PTL3 | | TGAATAAC | | CCdCUCGUUUUAGAGCUAGAAAUA | |
| | | CCTC | | GCAAGUUAAAAUAAGGCUAGUCC | |
| | | | | GUUAUCAACUUGAAAAAGUGGCA | |
| | | | | CCGAGUCGGUGCUsususu | |
| hANG | GA715 | AAGATACC | 386 | dAsdAsgsadUdAdCdCdUdGdAAUdAA | 641 |
| PTL3 | | TGAATAAC | | CdCCUCGUUUUAGAGCUAGAAAUA | |
| | | CCTC | | GCAAGUUAAAAUAAGGCUAGUCC | |
| | | | | GUUAUCAACUUGAAAAAGUGGCA | |
| | | | | CCGAGUCGGUGCUsususu | |
| cANG | GA720 | AGAAAAA | 387 | asgsaasaaAGAUACCUGAAUAACUCU | 642 |
| PTL3 | | GATACCTG | | CgUUUUAGagcuaGaaauagcaaGUUaAa | |
| | | AATAACTC | | AuAaggcuaGUccGUUAucAAcuuGaaaaa | |
| | | TC | | gugGcaccgagucggugcusususu | |
| cANG | GA721 | TCAGAAA | 388 | uscsagsaaAAAGAUACCUGAAUAACU | 643 |
| PTL3 | | AAGATACC | | CUCgUUUUAGagcuaGaaauagcaaGUUa | |
| | | TGAATAAC | | AaAuAaggcuaGUccGUUAucAAcuuGaa | |
| | | TCTC | | aaagugGcaccgagucggugcusususu | |
| hANG | GA724 | AAGATACC | 389 | asasgsdAdUdAdCCdUdGAAdUdAACC | 644 |
| PTL3 | | TGAATAAC | | CUCgUUUUAGagcuaGaaauagcaaGUUa | |
| | | CCTC | | AaAuAaggcuaGUccGUUAucAAcuuGaa | |
| | | | | aaagugGcaccgagucggugcusususu | |
| hANG | GA735 | AAGATACC | 390 | GGAAGAUACCUGAAUAACCCUCGU | 645 |
| PTL3 | | TGAATAAC | | UUUAGAGCUAGAAAUAGCAAGUU | |
| | | CCTC | | AAAAUAAGGCUAGUCCGUUAUCA | |
| | | | | ACUUGAAAAAGUGGCACCGAGUC | |
| | | | | GGUGCUUUU | |
| hANG | GA741 | AAGATACC | 39 | GAAGAUACCUGAAUAACCCUCGUU | 646 |
| PTL3 | | TGAATAAC | | UUAGAGCUAGAAAUAGCAAGUUA | |
| | | CCTC | | AAAUAAGGCUAGUCCGUUAUCAA | |
| | | | | CUUGAAAAAGUGGCACCGAGUCG | |
| | | | | GUGCUUUU | |
| cANG | GA344 | aagatacCTG | 392 | asasgsAUACCUGAAUAACUCUCGUU | 647 |
| PTL3 | | AATAACTC | | UUAGAGCUAGAAAUAGCAAGUUA | |
| | | TC | | AAAUAAGGCUAGUCCGUUAUCAA | |
| | | | | CUUGAAAAAGUGGCACCGAGUCG | |
| | | | | GUGCUsususu | |
| cANG | GA557 | AAGATACC | 393 | asasgsAUACCUGAAUAACUCUCgUU | 648 |
| PTL3 | | TGAATAAC | | UUAGagcuaGaaauagcaaGUUaAaAuAag | |
| | | TCTC | | gcuaGUccGUUAucAAcuuGaaaaaguggca | |
| | | | | ccgagucggugcusususuUUu | |
| cANG | GA663 | AAGATACC | 394 | asdAsgsadUdAdCdCdUdGdAAUdAAdC | 649 |
| PTL3 | | TGAATAAC | | dUdCUCgUUUUAGagcuaGaaauagcaaG | |
| | | TCTC | | UUaAaAuAaggcuaGUccGUUAucAAcuu | |
| | | | | GaaaaagugGcaccgagucggugcusususu | |
| cANG | GA664 | AAGATACC | 395 | asasdGsdAdUdAdCdCdUdGAdAUdAAd | 650 |
| PTL3 | | TGAATAAC | | CUdCUdCgUUUUAGagcuaGaaauagcaa | |
| | | TCTC | | GUUaAaAuAaggcuaGUccGUUAucAAc | |
| | | | | uuGaaaaagugGcaccgagucggugcusususu | |
| cANG | GA665 | AAGATACC | 396 | asasdGsdAdUdACdCUdGAdAUdAAdC | 651 |
| PTL3 | | TGAATAAC | | UdCUdCgUUUUAGagcuaGaaauagcaaG | |
| | | TCTC | | UUaAaAuAaggcuaGUccGUUAucAAcuu | |
| | | | | GaaaaagugGcaccgagucggugcusususu | |
| cANG | GA666 | AAGATACC | 397 | asdAsdGsdAdUdAdCdCdUdGAAUAAC | 652 |
| PTL3 | | TGAATAAC | | UCUCgUUUUAGagcuaGaaauagcaaGUU | |
| | | TCTC | | aAaAuAaggcuaGUccGUUAucAAcuuGa | |
| | | | | aaaagugGcaccgagucggugcusususu | |
| cANG | GA667 | AAGATACC | 398 | dAsdAsdGsdAdUdACdCdUdGdAAUAA | 653 |
| PTL3 | | TGAATAAC | | CUCUCgUUUUAGagcuaGaaauagcaaGU | |
| | | TCTC | | UaAaAuAaggcuaGUccGUUAucAAcuuG | |
| | | | | aaaaagugGcaccgagucggugcusususu | |
| cANG | GA668 | AAGATACC | 399 | asasgsAUAdCCdUGAAdUAACUCUCg | 654 |
| PTL3 | | TGAATAAC | | UUUUAGagcuaGaaauagcaaGUUaAaAu | |
| | | TCTC | | AaggcuaGUccGUUAucAAcuuGaaaaagu | |
| | | | | gGcaccgagucggugcusususu | |
| cANG | GA669 | AAGATACC | 400 | asdAsdGsdAdUdAdCdCdUdGAdAUdA | 655 |
| PTL3 | | TGAATAAC | | AdCUdCUdCgUUUUAGagcuaGaaauagc | |
| | | TCTC | | aaGUUaAaAuAaggcuaGUccGUUAucA | |
| | | | | AcuuGaaaaagugGcaccgagucggugcususus | |
| | | | | u | |
| cANG | GA734 | AAGATACC | 401 | GGAAGAUACCUGAAUAACUCUCG | 656 |
| PTL3 | | TGAATAAC | | UUUUAGAGCUAGAAAUAGCAAGU | |
| | | TCTC | | UAAAAUAAGGCUAGUCCGUUAUC | |
| | | | | AACUUGAAAAAGUGGCACCGAGU | |
| | | | | CGGUGCUUUU | |
| cANG | GA740 | AAGATACC | 402 | GAAGAUACCUGAAUAACUCUCGU | 657 |
| PTL3 | | TGAATAAC | | UUUAGAGCUAGAAAUAGCAAGUU | |
| | | TCTC | | AAAAUAAGGCUAGUCCGUUAUCA | |
| | | | | ACUUGAAAAAGUGGCACCGAGUC | |
| | | | | GGUGCUUUU | |
| cANG | GA747 | AAGATACC | 403 | asasgsdAdUdAdCCdUdGAAdUdAACU | 658 |
| PTL3 | | TGAATAAC | | CUCgUUUUAGagcuaGaaauagcaaGUUa | |
| | | TCTC | | AaAuAaggcuaGUccGUUAucAAcuuGaa | |
| | | | | aaagugGcaccgagucggugcusususu | |
| cANG | GA748 | AAGATACC | 404 | asasdGsdAUdAdCCUGAAUAACUCUC | 659 |
| PTL3 | | TGAATAAC | | gUUUUAGagcuaGaaauagcaaGUUaAaAu | |
| | | TCTC | | AaggcuaGUccGUUAucAAcuuGaaaaagu | |
| | | | | gGcaccgagucggugcusususu | |
| cANG | GA749 | AAGATACC | 405 | asasdGsdAUdAdCdCUGAAUAACUCU | 660 |
| PTL3 | | TGAATAAC | | CgUUUUAGagcuaGaaauagcaaGUUaAa | |
| | | TCTC | | AuAaggcuaGUccGUUAucAAcuuGaaaaa | |
| | | | | gugGcaccgagucggugcusususu | |
| cANG | GA750 | AAGATACC | 406 | asasdGsdAdUdAdCdCdUGAAUAACUC | 661 |
| PTL3 | | TGAATAAC | | UCgUUUUAGagcuaGaaauagcaaGUUaA | |
| | | TCTC | | aAuAaggcuaGUccGUUAucAAcuuGaaaa | |
| | | | | agugGcaccgagucggugcusususu | |
| cANG | GA751 | AAGATACC | 407 | asasdGsdAUdAdCdCdUGAAUAACUC | 662 |
| PTL3 | | TGAATAAC | | UCgUUUUAGagcuaGaaauagcaaGUUaA | |
| | | TCTC | | aAuAaggcuaGUccGUUAucAAcuuGaaaa | |
| | | | | agugGcaccgagucggugcusususu | |
| cANG | GA752 | AAGATACC | 408 | asasgAsdUAdCCdUGdAAdUAdACdUC | 663 |
| PTL3 | | TGAATAAC | | dUCgUUUUAGagcuaGaaauagcaaGUUa | |
| | | TCTC | | AaAuAaggcuaGUccGUUAucAAcuuGaa | |
| | | | | aaagugGcaccgagucggugcusususu | |
| cANG | GA755 | AAGATACC | 409 | asasdGsdAdUdAdCCUGAAUAACUCU | 664 |
| PTL3 | | TGAATAAC | | CGUUUUAGAGCUAGAAAUAGCAA | |
| | | TCTC | | GUUAAAAUAAGGCUAGUCCGUUA | |
| | | | | UCAACUUGAAAAAGUGGCACCGA | |
| | | | | GUCGGUGCUsususu | |
| cANG | GA756 | AAGATACC | 410 | asasgsAUACCUdGAAdUAACUdCUCG | 665 |
| PTL3 | | TGAATAAC | | UUUUAGAGCUAGAAAUAGCAAGU | |
| | | TCTC | | UAAAAUAAGGCUAGUCCGUUAUC | |
| | | | | AACUUGAAAAAGUGGCACCGAGU | |
| | | | | CGGUGCUsususu | |
| cANG | GA757 | AAGATACC | 411 | asasgsdAdUdAdCCdUdGAAdUdAACU | 666 |
| PTL3 | | TGAATAAC | | CUCGUUUUAGAGCUAGAAAUAGC | |
| | | TCTC | | AAGUUAAAAUAAGGCUAGUCCGU | |
| | | | | UAUCAACUUGAAAAAGUGGCACC | |
| | | | | GAGUCGGUGCUsususu | |
| cANG | GA758 | AAGATACC | 412 | asasdGsdAUdAdCCUGAAUAACUCUC | 667 |
| PTL3 | | TGAATAAC | | GUUUUAGAGCUAGAAAUAGCAAG | |
| | | TCTC | | UUAAAAUAAGGCUAGUCCGUUAU | |
| | | | | CAACUUGAAAAAGUGGCACCGAG | |
| | | | | UCGGUGCUsususu | |
| cANG | GA759 | AAGATACC | 413 | asasdGsdAUdAdCdCUGAAUAACUCU | 668 |
| PTL3 | | TGAATAAC | | CGUUUUAGAGCUAGAAAUAGCAA | |
| | | TCTC | | GUUAAAAUAAGGCUAGUCCGUUA | |
| | | | | UCAACUUGAAAAAGUGGCACCGA | |
| | | | | GUCGGUGCUsususu | |
| cANG | GA760 | AAGATACC | 414 | asasdGsdAdUdAdCdCdUGAAUAACUC | 669 |
| PTL3 | | TGAATAAC | | UCGUUUUAGAGCUAGAAAUAGCA | |
| | | TCTC | | AGUUAAAAUAAGGCUAGUCCGUU | |
| | | | | AUCAACUUGAAAAAGUGGCACCG | |
| | | | | AGUCGGUGCUsususu | |
| cANG | GA761 | AAGATACC | 415 | asasdGsdAUdAdCdCdUGAAUAACUC | 670 |
| PTL3 | | TGAATAAC | | UCGUUUUAGAGCUAGAAAUAGCA | |
| | | TCTC | | AGUUAAAAUAAGGCUAGUCCGUU | |
| | | | | AUCAACUUGAAAAAGUGGCACCG | |
| | | | | AGUCGGUGCUsususu | |
| cANG | GA762 | AAGATACC | 416 | asdAsgsadUdAdCdCdUdGdAAUdAAdC | 671 |
| PTL3 | | TGAATAAC | | dUdCUCGUUUUAGAGCUAGAAAUA | |
| | | TCTC | | GCAAGUUAAAAUAAGGCUAGUCC | |
| | | | | GUUAUCAACUUGAAAAAGUGGCA | |
| | | | | CCGAGUCGGUGCUsususu | |
| cANG | GA763 | AAGATACC | 417 | asasdGsdAdUdACdCUdGAdAUdAAdC | 672 |
| PTL3 | | TGAATAAC | | UdCUdCGUUUUAGAGCUAGAAAUA | |
| | | TCTC | | GCAAGUUAAAAUAAGGCUAGUCC | |
| | | | | GUUAUCAACUUGAAAAAGUGGCA | |
| | | | | CCGAGUCGGUGCUsususu | |
| cANG | GA764 | AAGATACC | 418 | asdAsdGsdAdTdAdCdCdTdGAAUAAC | 673 |
| PTL3 | | TGAATAAC | | UCUCGUUUUAGAGCUAGAAAUAG | |
| | | TCTC | | CAAGUUAAAAUAAGGCUAGUCCG | |
| | | | | UUAUCAACUUGAAAAAGUGGCAC | |
| | | | | CGAGUCGGUGCUsususu | |
| cANG | GA765 | AAGATACC | 419 | asasgsAUAdCCdUGAAdUAACUCUCG | 674 |
| PTL3 | | TGAATAAC | | UUUUAGAGCUAGAAAUAGCAAGU | |
| | | TCTC | | UAAAAUAAGGCUAGUCCGUUAUC | |
| | | | | AACUUGAAAAAGUGGCACCGAGU | |
| | | | | CGGUGCUsususu | |
| cANG | GA766 | AAGATACC | 420 | dAsdAsgsadUdAdCdCdUdGdAAUdAAd | 675 |
| PTL3 | | TGAATAAC | | CdUdCUCGUUUUAGAGCUAGAAAU | |
| | | TCTC | | AGCAAGUUAAAAUAAGGCUAGUC | |
| | | | | CGUUAUCAACUUGAAAAAGUGGC | |
| | | | | ACCGAGUCGGUGCUsususu | |
| cANG | GA767 | AAGATACC | 421 | asasgsAdUAdCCdUGdAAdUAdACdUC | 676 |
| PTL3 | | TGAATAAC | | dUCGUUUUAGAGCUAGAAAUAGCA | |
| | | TCTC | | AGUUAAAAUAAGGCUAGUCCGUU | |
| | | | | AUCAACUUGAAAAAGUGGCACCG | |
| | | | | AGUCGGUGCUsususu | |
| cANG | GA768 | AAGATACC | 422 | asasgsdAdUdAdCdCdUdGAAUAACUC | 677 |
| PTL3 | | TGAATAAC | | UCGUUUUAGAGCUAGAAAUAGCA | |
| | | TCTC | | AGUUAAAAUAAGGCUAGUCCGUU | |
| | | | | AUCAACUUGAAAAAGUGGCACCG | |
| | | | | AGUCGGUGCUsususu | |
| cANG | GA769 | AAGATACC | 423 | asasdGsdAdUdAdCdCdUdGAAUAACU | 678 |
| PTL3 | | TGAATAAC | | CUCGUUUUAGAGCUAGAAAUAGC | |
| | | TCTC | | AAGUUAAAAUAAGGCUAGUCCGU | |
| | | | | UAUCAACUUGAAAAAGUGGCACC | |
| | | | | GAGUCGGUGCUsususu | |
| cANG | GA770 | AAGATACC | 424 | asasgsAUdACCUGAAUAAdCUCUCGU | 679 |
| PTL3 | | TGAATAAC | | UUUAGAGCUAGAAAUAGCAAGUU | |
| | | TCTC | | AAAAUAAGGCUAGUCCGUUAUCA | |
| | | | | ACUUGAAAAAGUGGCACCGAGUC | |
| | | | | GGUGCUsususu | |
| hANG | GA656 | AAAGATAC | 425 | asasasGAUACCUGAAUAACCCUCgU | 680 |
| PTL3 | | CTGAATAA | | UUUAGagcuaGaaauagcaaGUUaAaAuAa | |
| | | CCCTC | | ggcuaGUccGUUAucAAcuuGaaaaagugG | |
| | | | | caccgagucggugcusususu | |
| hANG | GA657 | AAAAGATA | 426 | asasaasGAUACCUGAAUAACCCUCgU | 681 |
| PTL3 | | CCTGAATA | | UUUAGagcuaGaaauagcaaGUUaAaAuAa | |
| | | ACCCTC | | ggcuaGUccGUUAucAAcuuGaaaaagugG | |
| | | | | caccgagucggugcusususu | |
| hANG | GA658 | AAAAAGAT | 427 | asasaasaGAUACCUGAAUAACCCUCg | 682 |
| PTL3 | | ACCTGAAT | | UUUUAGagcuaGaaauagcaaGUUaAaAu | |
| | | AACCCTC | | AaggcuaGUccGUUAucAAcuuGaaaaagu | |
| | | | | gGcaccgagucggugcusususu | |
| hANG | GA659 | GAAAAAG | 428 | gsasaasaAGAUACCUGAAUAACCCUC | 683 |
| PTL3 | | ATACCTGA | | gUUUUAGagcuaGaaauagcaaGUUaAaAu | |
| | | ATAACCCT | | AaggcuaGUccGUUAucAAcuuGaaaaagu | |
| | | C | | gGcaccgagucggugcusususu | |
| hANG | GA660 | AGAAAAA | 429 | asgsaasaaAGAUACCUGAAUAACCCU | 684 |
| PTL3 | | GATACCTG | | CgUUUUAGagcuaGaaauagcaaGUUaAa | |
| | | AATAACCC | | AuAaggcuaGUccGUUAucAAcuuGaaaaa | |
| | | TC | | gugGcaccgagucggugcusususu | |
| hANG | GA661 | TCAGAAA | 430 | uscsagsaaAAAGAUACCUGAAUAACC | 685 |
| PTL3 | | AAGATACC | | CUCgUUUUAGagcuaGaaauagcaaGUUa | |
| | | TGAATAAC | | AaAuAaggcuaGUccGUUAucAAcuuGaa | |
| | | CCTC | | aaagugGcaccgagucggugcusususu | |
| hANG | GA662 | TATCAGAA | 431 | usasucsagAAAAAGAUACCUGAAUAA | 686 |
| PTL3 | | AAAGATAC | | CCCUCgUUUUAGagcuaGaaauagcaaGU | |
| | | CTGAATAA | | UaAaAuAaggcuaGUccGUUAucAAcuuG | |
| | | CCCTC | | aaaaagugGcaccgagucggugcusususu | |

Uppercase nucleotides (A, G, C, I and T) indicate 2′-deoxyribonucleotides, adenine, guanine, cytosine, inosine, and thymine, respectively; in Guide RNA sequence: uppercase nucleotides (A, C, G, I and U) indicate ribonucleotides, adenine, guanine, cytosine, inosine, and uracil, respectively and lowercase nucleotides (a, g, c, i and u) indicate 2′-O-methylribonucleotide (2′-OMe) unless otherwise specified.
It is understood that the DNA protospacer is converted to RNA or RNA-equivalent in the guide RNA design except when other modification including 2′-deoxyribonucleotides are introduced into the protospacer section of the single guide RNA; s: phosphorothioate (PS).
dA, dC and dG indicate 2′-deoxyadenosine, 2′-deoxycytidine and 2′-deoxyguanosine; dU indicates thymidine and/or 2′-deoxyuridine, and Z indicate zebularine or 4-deoxyuridine/4-deazacytidine.
Y or Y indicates pseudouridine, N1mY or N1mY indicates N1m-pseudouridine, MP-U indicates 2′-O-methyl-3′-phosphonoacetate-uridine, dW indicates 2′-deoxyethynylmethylpyridone-cytidine, 2,6-DAP indicates 2,6-diaminopurine, and a ″+″ symbol (+A, +G, +C, +U) indicate locked nucleic acids.
X is nebularine.

[chemical structure]

[0582] A summary of tracrRNA sequences is provided in Table 9.

TABLE 9
TracrRNA sequences

| | Sequence | Description | SEQ ID NO. |
|---|---|---|---|
| tracrRNA | GUUUUAGAGCUAGAAAUAGCAAGUUAA | Minimally | 3 |
| #1 | AAUAAGGCUAGUCCGUUAUCAACUUGAA | modified | |
| | AAAGUGGCACCGAGUCGGUGCUsususu | tracrRNA | |
| tracrRNA | gUUUUAGagcuaGaaauagcaaGUUaAaAuAaggc | 2′-OMe-enriched | 4 |
| #2 | uaGUccGUUAucAAcuuGaaaaagugGcaccgagucg | tracrRNA | |
| | gugcusususu | | |

[0583] A summary of gene editor proteins is provided in Table 10.

TABLE 10
Sequences of gene editor proteins and nucleic acids encoding thereof.

| | | |
|---|---|---|
| | Des- | SEQ ID |
| Sequences | cription | NO. |

MA004

| | | | |
|---|---|---|---|
| MA004 | AGGAAAu′AAGAGAGAAAAGAAGAGu′AAGAAGAAAu′ | mRNA | 687 |
| | Au′AAGAGCCACCAu′GAGCGAGGu′GGAGu′u′CAGCCA | | |
| | CGAGu′ACu′GGAu′GCGGCACGCCCu′GACCCu′GGCCA | | |
| | AGCGGGCCCGGGACGAGCGGGAGGu′GCCCGu′GGGCG | | |
| | CCGu′GCu′GGu′GCu′GAACAACCGGGu′GAu′CGGCGAG | | |
| | GGCu′GGAACCGGGCCAu′CGGCCu′GCACGACCCCACC | | |
| | GCCCACGCCGAGAu′CAu′GGCCCu′GCGGCAGGGCGGC | | |
| | Cu′GGu′GAu′GCAGAACu′ACCGGCu′GAu′CGACGCCAC | | |
| | CCu′Gu′ACGu′GACCu′u′CGAGCCCu′GCGu′GAu′Gu′GCG | | |
| | CCGGCGCCAu′GAu′CCACAGCCGGAu′CGGCCGGGu′GG | | |
| | u′Gu′u′CGGCGu′GCGGAACGCCAAGACCGGCGCCGCCG | | |
| | GCAGCCu′GAu′GGACGu′GCu′GCACCACCCCGGCAu′G | | |
| | AACCACCGGGu′GGAGAu′CACCGAGGGCAu′CCu′GGCC | | |
| | GACGAGu′GCGCCGCCCu′GCu′Gu′GCCGGu′u′Cu′u′CCG | | |
| | GAu′GCCCCGGCGGGu′Gu′u′CAACGCCCAGAAGAAGG | | |
| | CCCAGAGCAGCACCGACAGCGGCGGCAGCAGCGGCG | | |
| | GCAGCAGCGGCAGCGAGACACCCGGCACCAGCGAGA | | |
| | GCGCCACCCCCGAGAGCAGCGGCGGCAGCAGCGGCG | | |
| | GCAGCGACAAGAAGu′ACAGCAu′CGGCCu′GGCCAu′C | | |
| | GGCACCAACAGCGu′GGGCu′GGGCCGu′GAu′CACCGAC | | |
| | GAGu′ACAAGGu′GCCCAGCAAGAAGu′u′CAAGGu′GCu′ | | |
| | GGGCAACACCGACCGGCACAGCAu′CAAGAAGAACCU′ | | |
| | GAu′CGGCGCCCu′GCu′Gu′u′CGACAGCGGCGAGACAG | | |
| | CCGAGGCCACCCGGCu′GAAGCGGACCGCCCGGCGGC | | |
| | GGu′ACACCCGGCGGAAGAACCGGAu′Cu′GCu′ACCu′G | | |
| | CAGGAGAu′Cu′u′CAGCAACGAGAu′GGCCAAGGu′GGA | | |
| | CGACAGCu′u′Cu′u′CCACCGGCu′GGAGGAGAGCu′u′CC | | |
| | u′GGu′GGAGGAGGACAAGAAGCACGAGCGGCACCCCA | | |
| | u′Cu′u′CGGCAACAu′CGu′GGACGAGGu′GGCCu′ACCAC | | |
| | GAGAAGu′ACCCCACCAu′Cu′ACCACCu′GCGGAAGAAG | | |
| | Cu′GGu′GGACAGCACCGACAAGGCCGACCu′GCGGCu′G | | |
| | Au′Cu′ACCu′GGCCCu′GGCCCACAu′GAu′CAAGu′u′CCG | | |
| | GGGCCACu′u′CCu′GAu′CGAGGGCGACCu′GAACCCCG | | |
| | ACAACAGCGACGu′GGACAAGCu′Gu′u′CAu′CCAGCu′G | | |
| | Gu′GCAGACCu′ACAACCAGCu′Gu′u′CGAGGAGAACCC | | |
| | CAu′CAACGCCAGCGGCGu′GGACGCCAAGGCCAu′CCu′ | | |
| | GAGCGCCCGGCu′GAGCAAGAGCCGGCGGCu′GGAGAA | | |
| | CCu′GAu′CGCCCAGCu′GCCCGGCGAGAAGAAGAACGG | | |
| | CCu′Gu′u′CGGCAACCu′GAu′CGCCCu′GAGCCu′GGGCCu | | |
| | ′GACCCCCAACu′u′CAAGAGCAACu′u′CGACCu′GGCCG | | |
| | AGGACGCCAAGCu′GCAGCu′GAGCAAGGACACCu′ACG | | |
| | ACGACGACCu′GGACAACCu′GCu′GGCCCAGAu′CGGCG | | |
| | ACCAGu′ACGCCGACCu′Gu′u′CCu′GGCCGCCAAGAACC | | |
| | u′GAGCGACGCCAu′CCu′GCu′GAGCGACAu′CCu′GCGG | | |
| | Gu′GAACACCGAGAu′CACCAAGGCCCCCCu′GAGCGCC | | |
| | AGCAu′GAu′CAAGCGGu′ACGACGAGCACCACCAGGAC | | |
| | Cu′GACCCu′GCu′GAAGGCCCu′GGu′GCGGCAGCAGCu′ | | |
| | GCCCGAGAAGu′ACAAGGAGAu′Cu′u′Cu′u′CGACCAGA | | |
| | GCAAGAACGGCu′ACGCCGGCu′ACAu′CGACGGCGGCG | | |
| | CCAGCCAGGAGGAGu′u′Cu′ACAAGu′u′CAu′CAAGCCC | | |
| | Au′CCu′GGAGAAGAu′GGACGGCACCGAGGAGCu′GCu′ | | |
| | GGu′GAAGCu′GAACCGGGAGGACCu′GCu′GCGGAAGC | | |
| | AGCGGACCu′u′CGACAACGGCAGCAu′CCCCCACCAGA | | |
| | u′CCACCu′GGGCGAGCu′GCACGCCAu′CCu′GCGGCGGC | | |
| | AGGAGGACu′u′Cu′ACCCCu′u′CCu′GAAGGACAACCGG | | |
| | GAGAAGAu′CGAGAAGAu′CCu′GACCu′u′CCGGAu′CCC | | |
| | Cu′ACu′ACGu′GGGCCCCCu′GGCCCGGGGCAACAGCCG | | |
| | Gu′u′CGCCu′GGAu′GACCCGCAAGAGCGAGGAGACAAu | | |
| | ′CACCCCCu′GGAACu′u′CGAGGAGGu′GGu′GGACAAGG | | |
| | GCGCCAGCGCCCAGAGCu′u′CAu′CGAGCGGAu′GACCA | | |
| | ACu′u′CGACAAGAACCu′GCCCAACGAGAAGGu′GCu′G | | |
| | CCCAAGCACAGCCu′GCu′Gu′ACGAGu′ACu′u′CACCGu′ | | |
| | Gu′ACAACGAGCu′GACCAAGGu′GAAGu′ACGu′GACCG | | |
| | AGGGCAu′GCGGAAGCCCGCCu′u′CCu′GAGCGGCGAGC | | |
| | AGAAGAAGGCCAu′CGu′GGACCu′GCu′Gu′u′CAAGACC | | |
| | AACCGGAAGGu′GACCGu′GAAGCAGCu′GAAGGAGGA | | |
| | Cu′ACu′u′CAAGAAGAu′CGAGu′GCu′u′CGACAGCGu′GG | | |
| | AGAu′CAGCGGCGu′GGAGGACCGGu′u′CAACGCCAGC | | |
| | Cu′GGGCACCu′ACCACGACCu′GCu′GAAGAu′CAu′CAA | | |
| | GGACAAGGACu′u′CCu′GGACAACGAGGAGAACGAGG | | |
| | ACAu′CCu′GGAGGACAu′CGu′GCu′GACCCu′GACCCu′G | | |
| | u′u′CGAGGACCGGGAGAu′GAu′CGAGGAGCGGCu′GAA | | |
| | GACCu′ACGCCCACCu′Gu′u′CGACGACAAGGu′GAu′GA | | |
| | AGCAGCu′GAAGCGGCGGCGGu′ACACCGGCu′GGGGCC | | |
| | GGCu′GAGCCGGAAGCu′GAu′CAACGGCAu′CCGGGAC | | |
| | AAGCAGAGCGGCAAGACCAu′CCu′GGACu′u′CCu′CAA | | |
| | GAGCGACGGCu′u′CGCCAACCGGAACu′u′CAu′GCAGC | | |
| | u′GAu′CCACGACGACAGCCu′GACCu′u′CAAGGAGGAC | | |
| | Au′CCAGAAGGCCCAGGu′GAGCGGCCAGGGCGACAGC | | |
| | Cu′GCACGAGCACAu′CGCCAACCu′GGCCGGCAGCCCC | | |
| | GCCAu′CAAGAAGGGCAu′CCu′GCAGACCGu′GAAGGu′ | | |
| | GGu′GGACGAGCu′GGu′GAAGGu′GAu′GGGCCGGCACA | | |
| | AGCCCGAGAACAu′CGu′GAu′CGAGAu′GGCCCGGGAG | | |
| | AACCAGACCACCCAGAAGGGCCAGAAGAACAGCCGG | | |
| | GAGCGGAu′GAAGCGGAu′CGAGGAGGGCAu′CAAGGA | | |
| | GCu′GGGCAGCCAGAu′CCu′GAAGGAGCACCCCGu′GG | | |
| | AGAACACCCAGCu′GCAGAACGAGAAGCu′Gu′ACCu′Gu | | |
| | ′ACu′ACCu′GCAGAACGGCCGGGACAu′Gu′ACGu′GGAC | | |
| | CAGGAGCu′GGACAu′CAACCGGCu′GAGCGACu′ACGA | | |
| | CGu′GGACCACAu′CGu′GCCCCAGAGCu′u′CCu′GAAGG | | |
| | ACGACAGCAu′CGACAACAAGGu′GCu′GACCCGGAGCG | | |
| | ACAAGAACCGGGGCAAGAGCGACAACGu′GCCCAGCG | | |
| | AGGAGGu′GGu′GAAGAAGAu′GAAGAACu′ACu′GGCGG | | |
| | CAGCu′GCu′GAACGCCAAGCu′GAu′CACCCAGCGGAAG | | |
| | u′u′CGACAACCu′GACCAAGGCCGAGCGGGGCGGCCu′G | | |
| | AGCGAGCu′GGACAAGGCCGGCu′u′CAu′CAAGCGGCA | | |
| | GCu′GGu′GGAGACACGGCAGAu′CACCAAGCACGu′GG | | |
| | CCCAGAu′CCu′GGACAGCCGGAu′GAACACCAAGu′ACG | | |
| | ACGAGAACGACAAGCu′GAu′CCGGGAGGu′GAAGGu′G | | |
| | Au′CACCCu′CAAGAGCAAGCu′GGu′GAGCGACu′u′CCG | | |
| | GAAGGACu′u′CCAGu′u′Cu′ACAAGGu′GCGGGAGAu′CA | | |
| | ACAACu′ACCACCACGCCCACGACGCCu′ACCu′GAACG | | |
| | CCGu′GGu′GGGCACCGCCCu′GAu′CAAGAAGu′ACCCC | | |
| | AAGCu′GGAGAGCGAGu′u′CGu′Gu′ACGGCGACu′ACAA | | |
| | GGu′Gu′ACGACGu′GCGGAAGAu′GAu′CGCCAAGAGCG | | |
| | AGCAGGAGAu′CGGCAAGGCCACCGCCAAGu′ACu′u′Cu | | |
| | ′u′Cu′ACAGCAACAu′CAu′GAACu′u′Cu′u′CAAGACCGA | | |
| | GAu′CACCCu′GGCCAACGGCGAGAu′CCGGAAGCGGCC | | |
| | CCu′GAu′CGAGACAAACGGCGAGACAGGCGAGAu′CGu | | |
| | ′Gu′GGGACAAGGGCCGGGACu′u′CGCCACCGu′GCGGA | | |
| | AGGu′GCu′GAGCAu′GCCCCAGGu′GAACAu′CGu′GAAG | | |
| | AAGACCGAGGu′GCAGACCGGCGGCu′u′CAGCAAGGA | | |
| | GAGCAu′CCu′GCCCAAGCGGAACAGCGACAAGCu′GAu | | |
| | ′CGCCCGGAAGAAGGACu′GGGACCCCAAGAAGu′ACG | | |
| | GCGGCu′u′CGAGAGCCCCACCGu′GGCCu′ACAGCGu′G | | |
| | Cu′GGu′GGu′GGCCAAGGu′GGAGAAGGGCAAGAGCAA | | |
| | GAAGCu′CAAGAGCGu′GAAGGAGCu′GCu′GGGCAu′CA | | |
| | CCAu′CAu′GGAGCGGAGCAGCu′u′CGAGAAGAACCCC | | |
| | Au′CGACu′u′CCu′GGAGGCCAAGGGCu′ACAAGGAGGu′ | | |
| | GAAGAAGGACCu′GAu′CAu′CAAGCu′GCCCAAGu′ACA | | |
| | GCCu′Gu′u′CGAGCu′GGAGAACGGCCGGAAGCGGAu′G | | |
| | Cu′GGCCAGCGCCGGCGAGCu′GCAGAAGGGCAACGAG | | |
| | Cu′GGCCCu′GCCCAGCAAGu′ACGu′GAACu′u′CCu′Gu′A | | |
| | CCu′GGCCAGCCACu′ACGAGAAGCu′GAAGGGCAGCCC | | |
| | CGAGGACAACGAGCAGAAGCAGCu′Gu′u′CGu′GGAGC | | |
| | AGCACAAGCACu′ACCu′GGACGAGAu′CAu′CGAGCAG | | |
| | Au′CAGCGAGu′u′CAGCAAGCGGGu′GAu′CCu′GGCCGA | | |
| | CGCCAACCu′GGACAAGGu′GCu′GAGCGCCu′ACAACAA | | |
| | GCACCGGGACAAGCCCAu′CCGGGAGCAGGCCGAGAA | | |
| | CAu′CAu′CCACCu′Gu′u′CACCCu′GACCAACCu′GGGCG | | |
| | CCCCCGCCGCCu′u′CAAGu′ACu′u′CGACACCACCAu′CG | | |
| | ACCGGAAGCGGu′ACACCAGCACCAAGGAGGu′GCu′GG | | |
| | ACGCCACCCu′GAu′CCACCAGAGCAu′CACCGGCCu′Gu′ | | |
| | ACGAGACACGGAu′CGACCu′GAGCCAGCu′GGGCGGCG | | |
| | ACGAGGGCGCCGACAAGCGGACCGCCGACGGCAGCG | | |
| | AGu′u′CGAGAGCCCCAAGAAGAAGCGGAAGGu′Gu′GA | | |
| | GCGGCCGCu′u′AAu′u′AAGCu′GCCu′u′Cu′GCGGGGCu′u | | |
| | ′GCCu′u′Cu′GGCCAu′GCCCu′u′Cu′u′Cu′Cu′CCCu′u′GCA | | |
| | CCu′Gu′ACCu′Cu′u′GGu′Cu′u′u′GAAu′AAAGCCu′GAGu′ | | |
| | AGGAAGu′Cu′AGA | | |
| | MSEVEFSHEYWMRHALTLAKRARDEREVPVGAVLVLN | Protein | 688 |
| | NRVIGEGWNRAIGLHDPTAHAEIMALRQGGLVMQNYRL | | |
| | IDATLYVTFEPCVMCAGAMIHSRIGRVVFGVRNAKTGA | | |
| | AGSLMDVLHHPGMNHRVEITEGILADECAALLCRFFRMP | | |
| | RRVFNAQKKAQSSTDSGGSSGGSSGSETPGTSESATPESS | | |
| | GGSSGGSDKKYSIGLAIGTNSVGWAVITDEYKVPSKKFK | | |
| | VLGNTDRHSIKKNLIGALLFDSGETAEATRLKRTARRRY | | |
| | TRRKNRICYLQEIFSNEMAKVDDSFFHRLEESFLVEEDKK | | |
| | HERHPIFGNIVDEVAYHEKYPTIYHLRKKLVDSTDKADL | | |
| | RLIYLALAHMIKFRGHFLIEGDLNPDNSDVDKLFIQLVQT | | |
| | YNQLFEENPINASGVDAKAILSARLSKSRRLENLIAQLPG | | |
| | EKKNGLFGNLIALSLGLTPNFKSNFDLAEDAKLQLSKDT | | |
| | YDDDLDNLLAQIGDQYADLFLAAKNLSDAILLSDILRVN | | |
| | TEITKAPLSASMIKRYDEHHQDLTLLKALVRQQLPEKYK | | |
| | EIFFDQSKNGYAGYIDGGASQEEFYKFIKPILEKMDGTEE | | |
| | LLVKLNREDLLRKQRTFDNGSIPHQIHLGELHAILRRQED | | |
| | FYPFLKDNREKIEKILTFRIPYYVGPLARGNSRFAWMTRK | | |
| | SEETITPWNFEEVVDKGASAQSFIERMTNFDKNLPNEKV | | |
| | LPKHSLLYEYFTVYNELTKVKYVTEGMRKPAFLSGEQK | | |
| | KAIVDLLFKTNRKVTVKQLKEDYFKKIECFDSVEISGVED | | |
| | RFNASLGTYHDLLKIIKDKDFLDNEENEDILEDIVLTLTLF | | |
| | EDREMIEERLKTYAHLFDDKVMKQLKRRRYTGWGRLSR | | |
| | KLINGIRDKQSGKTILDFLKSDGFANRNFMQLIHDDSLTF | | |
| | KEDIQKAQVSGQGDSLHEHIANLAGSPAIKKGILQTVKV | | |
| | VDELVKVMGRHKPENIVIEMARENQTTQKGQKNSRERM | | |
| | KRIEEGIKELGSQILKEHPVENTQLQNEKLYLYYLQNGR | | |
| | DMYVDQELDINRLSDYDVDHIVPQSFLKDDSIDNKVLTR | | |
| | SDKNRGKSDNVPSEEVVKKMKNYWRQLLNAKLITQRKF | | |
| | DNLTKAERGGLSELDKAGFIKRQLVETRQITKHVAQILD | | |
| | SRMNTKYDENDKLIREVKVITLKSKLVSDFRKDFQFYKV | | |
| | REINNYHHAHDAYLNAVVGTALIKKYPKLESEFVYGDY | | |
| | KVYDVRKMIAKSEQEIGKATAKYFFYSNIMNFFKTEITL | | |
| | ANGEIRKRPLIETNGETGEIVWDKGRDFATVRKVLSMPQ | | |
| | VNIVKKTEVQTGGFSKESILPKRNSDKLIARKKDWDPKK | | |
| | YGGFESPTVAYSVLVVAKVEKGKSKKLKSVKELLGITIM | | |
| | ERSSFEKNPIDFLEAKGYKEVKKDLIIKLPKYSLFELENGR | | |
| | KRMLASAGELQKGNELALPSKYVNFLYLASHYEKLKGS | | |
| | PEDNEQKQLFVEQHKHYLDEIIEQISEFSKRVILADANLD | | |
| | KVLSAYNKHRDKPIREQAENIIHLFTLTNLGAPAAFKYFD | | |
| | TTIDRKRYTSTKEVLDATLIHQSITGLYETRIDLSQLGGDE | | |
| | GADKRTADGSEFESPKKKRKV | | |
| 5′ UTR | AGGAAAu′AAGAGAGAAAAGAAGAGu′AAGAAGAAAu′ | mRNA | 689 |
| | Au′AAGAGCCACC | | |
| TadA | Au′GAGCGAGGu′GGAGu′u′CAGCCACGAGu′ACu′GGAu′ | mRNA | 690 |
| | GCGGCACGCCCu′GACCCu′GGCCAAGCGGGCCCGGGA | | |
| | CGAGCGGGAGGu′GCCCGu′GGGCGCCGu′GCu′GGu′GCu | | |
| | ′GAACAACCGGGu′GAu′CGGCGAGGGCu′GGAACCGGG | | |
| | CCAu′CGGCCu′GCACGACCCCACCGCCCACGCCGAGAu | | |
| | ′CAu′GGCCCu′GCGGCAGGGCGGCCu′GGu′GAu′GCAGA | | |
| | ACu′ACCGGCu′GAu′CGACGCCACCCu′Gu′ACGu′GACCu | | |
| | ′u′CGAGCCCu′GCGu′GAu′Gu′GCGCCGGCGCCAu′GAu′C | | |
| | CACAGCCGGAu′CGGCCGGGu′GGu′Gu′u′CGGCGu′GCG | | |
| | GAACGCCAAGACCGGCGCCGCCGGCAGCCu′GAu′GGA | | |
| | CGu′GCu′GCACCACCCCGGCAu′GAACCACCGGGu′GGA | | |
| | GAu′CACCGAGGGCAu′CCu′GGCCGACGAGu′GCGCCGC | | |
| | CCu′GCu′Gu′GCCGGu′u′Cu′u′CCGGAu′GCCCCGGCGGG | | |
| | u′Gu′u′CAACGCCCAGAAGAAGGCCCAGAGCAGCACCG | | |
| | AC | | |
| | MSEVEFSHEYWMRHALTLAKRARDEREVPVGAVLVLN | Protein | 691 |
| | NRVIGEGWNRAIGLHDPTAHAEIMALRQGGLVMQNYRL | | |
| | IDATLYVTFEPCVMCAGAMIHSRIGRVVFGVRNAKTGA | | |
| | AGSLMDVLHHPGMNHRVEITEGILADECAALLCRFFRMP | | |
| | RRVFNAQKKAQSSTD | | |
| Linker | AGCGGCGGCAGCAGCGGCGGCAGCAGCGGCAGCGAG | mRNA | 692 |
| between | ACACCCGGCACCAGCGAGAGCGCCACCCCCGAGAGCA | | |
| TadA | GCGGCGGCAGCAGCGGCGGCAGC | | |
| and Cas9 | SGGSSGGSSGSETPGTSESATPESSGGSSGGS | Protein | 693 |
| nickase | | | |
| Cas9 | GACAAGAAGu′ACAGCAu′CGGCCu′GGCCAu′CGGCACC | mRNA | 694 |
| nickase | AACAGCGu′GGGCu′GGGCCGu′GAu′CACCGACGAGu′A | | |
| | CAAGGu′GCCCAGCAAGAAGu′u′CAAGGu′GCu′GGGCA | | |
| | ACACCGACCGGCACAGCAu′CAAGAAGAACCu′GAu′CG | | |
| | GCGCCCu′GCu′Gu′u′CGACAGCGGCGAGACAGCCGAGG | | |
| | CCACCCGGCu′GAAGCGGACCGCCCGGCGGCGGu′ACA | | |
| | CCCGGCGGAAGAACCGGAu′Cu′GCu′ACCu′GCAGGAG | | |
| | Au′Cu′u′CAGCAACGAGAu′GGCCAAGGu′GGACGACAG | | |
| | Cu′u′Cu′u′CCACCGGCu′GGAGGAGAGCu′u′CCu′GGu′GG | | |
| | AGGAGGACAAGAAGCACGAGCGGCACCCCAu′Cu′u′CG | | |
| | GCAACAu′CGu′GGACGAGGu′GGCCu′ACCACGAGAAGu | | |
| | ′ACCCCACCAu′Cu′ACCACCu′GCGGAAGAAGCu′GGu′G | | |
| | GACAGCACCGACAAGGCCGACCu′GCGGCu′GAu′Cu′AC | | |
| | Cu′GGCCCu′GGCCCACAu′GAu′CAAGu′u′CCGGGGCCA | | |
| | Cu′u′CCu′GAu′CGAGGGCGACCu′GAACCCCGACAACA | | |
| | GCGACGu′GGACAAGCu′Gu′u′CAu′CCAGCu′GGu′GCAG | | |
| | ACCu′ACAACCAGCu′Gu′u′CGAGGAGAACCCCAu′CAA | | |
| | CGCCAGCGGCGu′GGACGCCAAGGCCAu′CCu′GAGCGC | | |
| | CCGGCu′GAGCAAGAGCCGGCGGCu′GGAGAACCu′GAu | | |
| | ′CGCCCAGCu′GCCCGGCGAGAAGAAGAACGGCCu′Gu′u | | |
| | ′CGGCAACCu′GAu′CGCCCu′GAGCCu′GGGCCu′GACCC | | |
| | CCAACu′u′CAAGAGCAACu′u′CGACCu′GGCCGAGGAC | | |
| | GCCAAGCu′GCAGCu′GAGCAAGGACACCu′ACGACGAC | | |
| | GACCu′GGACAACCu′GCu′GGCCCAGAu′CGGCGACCAG | | |
| | u′ACGCCGACCu′Gu′u′CCu′GGCCGCCAAGAACCU′GAG | | |
| | CGACGCCAu′CCu′GCu′GAGCGACAu′CCu′GCGGGu′GA | | |
| | ACACCGAGAu′CACCAAGGCCCCCCu′GAGCGCCAGCA | | |
| | u′GAu′CAAGCGGu′ACGACGAGCACCACCAGGACCu′G | | |
| | ACCCu′GCu′GAAGGCCCu′GGu′GCGGCAGCAGCu′GCCC | | |
| | GAGAAGu′ACAAGGAGAu′Cu′u′Cu′u′CGACCAGAGCAA | | |
| | GAACGGCu′ACGCCGGCu′ACAu′CGACGGCGGCGCCAG | | |
| | CCAGGAGGAGu′u′Cu′ACAAGu′u′CAu′CAAGCCCAu′CC | | |
| | u′GGAGAAGAu′GGACGGCACCGAGGAGCu′GCu′GGu′G | | |
| | AAGCu′GAACCGGGAGGACCu′GCu′GCGGAAGCAGCG | | |
| | GACCu′u′CGACAACGGCAGCAu′CCCCCACCAGAu′CCA | | |
| | CCu′GGGCGAGCu′GCACGCCAu′CCu′GCGGCGGCAGGA | | |
| | GGACu′u′Cu′ACCCCu′u′CCu′GAAGGACAACCGGGAGA | | |
| | AGAu′CGAGAAGAu′CCu′GACCu′u′CCGGAu′CCCCu′AC | | |
| | u′ACGu′GGGCCCCCu′GGCCCGGGGCAACAGCCGGu′u′C | | |
| | GCCu′GGAu′GACCCGCAAGAGCGAGGAGACAAu′CACC | | |
| | CCCu′GGAACu′u′CGAGGAGGu′GGu′GGACAAGGGCGC | | |
| | CAGCGCCCAGAGCu′u′CAu′CGAGCGGAu′GACCAACu′u | | |
| | ′CGACAAGAACCu′GCCCAACGAGAAGGu′GCu′GCCCA | | |
| | AGCACAGCCu′GCu′Gu′ACGAGu′ACu′u′CACCGu′Gu′AC | | |
| | AACGAGCu′GACCAAGGu′GAAGu′ACGu′GACCGAGGG | | |
| | CAu′GCGGAAGCCCGCCu′u′CCu′GAGCGGCGAGCAGAA | | |
| | GAAGGCCAu′CGu′GGACCu′GCu′Gu′u′CAAGACCAACC | | |
| | GGAAGGu′GACCGu′GAAGCAGCu′GAAGGAGGACu′AC | | |
| | u′u′CAAGAAGAu′CGAGu′GCu′u′CGACAGCGu′GGAGAu | | |
| | ′CAGCGGCGu′GGAGGACCGGu′u′CAACGCCAGCCu′GG | | |
| | GCACCu′ACCACGACCu′GCu′GAAGAu′CAu′CAAGGAC | | |
| | AAGGACu′u′CCu′GGACAACGAGGAGAACGAGGACAu′ | | |
| | CCu′GGAGGACAu′CGu′GCu′GACCCu′GACCCu′Gu′u′CG | | |
| | AGGACCGGGAGAu′GAu′CGAGGAGCGGCu′GAAGACCu | | |
| | ′ACGCCCACCu′Gu′u′CGACGACAAGGu′GAu′GAAGCAG | | |
| | Cu′GAAGCGGCGGCGGu′ACACCGGCu′GGGGCCGGCu′ | | |
| | GAGCCGGAAGCu′GAu′CAACGGCAu′CCGGGACAAGCA | | |
| | GAGCGGCAAGACCAu′CCu′GGACu′u′CCu′CAAGAGCG | | |
| | ACGGCu′u′CGCCAACCGGAACu′u′CAu′GCAGCu′GAu′C | | |
| | CACGACGACAGCCu′GACCu′u′CAAGGAGGACAu′CCAG | | |
| | AAGGCCCAGGu′GAGCGGCCAGGGCGACAGCCu′GCAC | | |
| | GAGCACAu′CGCCAACCu′GGCCGGCAGCCCCGCCAu′C | | |
| | AAGAAGGGCAu′CCu′GCAGACCGu′GAAGGu′GGu′GGA | | |
| | CGAGCu′GGu′GAAGGu′GAu′GGGCCGGCACAAGCCCG | | |
| | AGAACAu′CGu′GAu′CGAGAu′GGCCCGGGAGAACCAG | | |
| | ACCACCCAGAAGGGCCAGAAGAACAGCCGGGAGCGG | | |
| | Au′GAAGCGGAu′CGAGGAGGGCAu′CAAGGAGCu′GGG | | |
| | CAGCCAGAu′CCu′GAAGGAGCACCCCGu′GGAGAACAC | | |
| | CCAGCu′GCAGAACGAGAAGCu′Gu′ACCu′Gu′ACu′ACC | | |
| | u′GCAGAACGGCCGGGACAu′Gu′ACGu′GGACCAGGAG | | |
| | Cu′GGACAu′CAACCGGCu′GAGCGACu′ACGACGu′GGA | | |
| | CCACAu′CGu′GCCCCAGAGCu′u′CCu′GAAGGACGACA | | |
| | GCAu′CGACAACAAGGu′GCu′GACCCGGAGCGACAAGA | | |
| | ACCGGGGCAAGAGCGACAACGu′GCCCAGCGAGGAGG | | |
| | u′GGu′GAAGAAGAu′GAAGAACu′ACu′GGCGGCAGCu′G | | |
| | Cu′GAACGCCAAGCu′GAu′CACCCAGCGGAAGu′u′CGA | | |
| | CAACCu′GACCAAGGCCGAGCGGGGCGGCCu′GAGCGA | | |
| | GCu′GGACAAGGCCGGCu′u′CAu′CAAGCGGCAGCu′GGu | | |
| | ′GGAGACACGGCAGAu′CACCAAGCACGu′GGCCCAGAu | | |
| | ′CCu′GGACAGCCGGAu′GAACACCAAGu′ACGACGAGA | | |
| | ACGACAAGCu′GAu′CCGGGAGGu′GAAGGu′GAu′CACC | | |
| | Cu′CAAGAGCAAGCu′GGu′GAGCGACu′u′CCGGAAGGA | | |
| | Cu′u′CCAGu′u′Cu′ACAAGGu′GCGGGAGAu′CAACAACu′ | | |
| | ACCACCACGCCCACGACGCCu′ACCu′GAACGCCGu′GG | | |
| | u′GGGCACCGCCCu′GAu′CAAGAAGu′ACCCCAAGCu′G | | |
| | GAGAGCGAGu′u′CGu′Gu′ACGGCGACu′ACAAGGu′Gu′A | | |
| | CGACGu′GCGGAAGAu′GAu′CGCCAAGAGCGAGCAGG | | |
| | AGAu′CGGCAAGGCCACCGCCAAGu′ACu′u′Cu′u′Cu′AC | | |
| | AGCAACAu′CAu′GAACu′u′Cu′u′CAAGACCGAGAu′CAC | | |
| | CCu′GGCCAACGGCGAGAu′CCGGAAGCGGCCCCu′GAu′ | | |
| | CGAGACAAACGGCGAGACAGGCGAGAu′CGu′Gu′GGG | | |
| | ACAAGGGCCGGGACu′u′CGCCACCGu′GCGGAAGGu′G | | |
| | Cu′GAGCAu′GCCCCAGGu′GAACAu′CGu′GAAGAAGAC | | |
| | CGAGGu′GCAGACCGGCGGCu′u′CAGCAAGGAGAGCAu | | |
| | ′CCu′GCCCAAGCGGAACAGCGACAAGCu′GAu′CGCCC | | |
| | GGAAGAAGGACu′GGGACCCCAAGAAGu′ACGGCGGCu | | |
| | ′u′CGAGAGCCCCACCGu′GGCCu′ACAGCGu′GCu′GGu′G | | |
| | Gu′GGCCAAGGu′GGAGAAGGGCAAGAGCAAGAAGCu′ | | |
| | CAAGAGCGu′GAAGGAGCu′GCu′GGGCAu′CACCAu′CA | | |
| | u′GGAGCGGAGCAGCu′u′CGAGAAGAACCCCAu′CGACu | | |
| | ′u′CCu′GGAGGCCAAGGGCu′ACAAGGAGGu′GAAGAAG | | |
| | GACCu′GAu′CAu′CAAGCu′GCCCAAGu′ACAGCCu′Gu′u′ | | |
| | CGAGCu′GGAGAACGGCCGGAAGCGGAu′GCu′GGCCA | | |
| | GCGCCGGCGAGCu′GCAGAAGGGCAACGAGCu′GGCCC | | |
| | u′GCCCAGCAAGu′ACGu′GAACu′u′CCu′Gu′ACCu′GGCC | | |
| | AGCCACu′ACGAGAAGCu′GAAGGGCAGCCCCGAGGAC | | |
| | AACGAGCAGAAGCAGCu′Gu′u′CGu′GGAGCAGCACAA | | |
| | GCACu′ACCu′GGACGAGAu′CAu′CGAGCAGAu′CAGCG | | |
| | AGu′u′CAGCAAGCGGGu′GAu′CCu′GGCCGACGCCAAC | | |
| | Cu′GGACAAGGu′GCu′GAGCGCCu′ACAACAAGCACCG | | |
| | GGACAAGCCCAu′CCGGGAGCAGGCCGAGAACAu′CAu′ | | |
| | CCACCu′Gu′u′CACCCu′GACCAACCu′GGGCGCCCCCGC | | |
| | CGCCu′u′CAAGu′ACu′u′CGACACCACCAu′CGACCGGA | | |
| | AGCGGu′ACACCAGCACCAAGGAGGu′GCu′GGACGCCA | | |
| | CCCu′GAu′CCACCAGAGCAu′CACCGGCCu′Gu′ACGAGA | | |
| | CACGGAu′CGACCu′GAGCCAGCu′GGGCGGCGAC | | |
| | DKKYSIGLAIGTNSVGWAVITDEYKVPSKKFKVLGNTDR | Protein | 695 |
| | HSIKKNLIGALLFDSGETAEATRLKRTARRRYTRRKNRIC | | |
| | YLQEIFSNEMAKVDDSFFHRLEESFLVEEDKKHERHPIFG | | |
| | NIVDEVAYHEKYPTIYHLRKKLVDSTDKADLRLIYLALA | | |
| | HMIKFRGHFLIEGDLNPDNSDVDKLFIQLVQTYNQLFEE | | |
| | NPINASGVDAKAILSARLSKSRRLENLIAQLPGEKKNGLF | | |
| | GNLIALSLGLTPNFKSNFDLAEDAKLQLSKDTYDDDLDN | | |
| | LLAQIGDQYADLFLAAKNLSDAILLSDILRVNTEITKAPL | | |
| | SASMIKRYDEHHQDLTLLKALVRQQLPEKYKEIFFDQSK | | |
| | NGYAGYIDGGASQEEFYKFIKPILEKMDGTEELLVKLNR | | |
| | EDLLRKQRTFDNGSIPHQIHLGELHAILRRQEDFYPFLKD | | |
| | NREKIEKILTFRIPYYVGPLARGNSRFAWMTRKSEETITP | | |
| | WNFEEVVDKGASAQSFIERMTNFDKNLPNEKVLPKHSLL | | |
| | YEYFTVYNELTKVKYVTEGMRKPAFLSGEQKKAIVDLL | | |
| | FKTNRKVTVKQLKEDYFKKIECFDSVEISGVEDRFNASL | | |
| | GTYHDLLKIIKDKDFLDNEENEDILEDIVLTLTLFEDREMI | | |
| | EERLKTYAHLFDDKVMKQLKRRRYTGWGRLSRKLINGI | | |
| | RDKQSGKTILDFLKSDGFANRNFMQLIHDDSLTFKEDIQ | | |
| | KAQVSGQGDSLHEHIANLAGSPAIKKGILQTVKVVDELV | | |
| | KVMGRHKPENIVIEMARENQTTQKGQKNSRERMKRIEE | | |
| | GIKELGSQILKEHPVENTQLQNEKLYLYYLQNGRDMYV | | |
| | DQELDINRLSDYDVDHIVPQSFLKDDSIDNKVLTRSDKN | | |
| | RGKSDNVPSEEVVKKMKNYWRQLLNAKLITQRKFDNLT | | |
| | KAERGGLSELDKAGFIKRQLVETRQITKHVAQILDSRMN | | |
| | TKYDENDKLIREVKVITLKSKLVSDFRKDFQFYKVREIN | | |
| | NYHHAHDAYLNAVVGTALIKKYPKLESEFVYGDYKVY | | |
| | DVRKMIAKSEQEIGKATAKYFFYSNIMNFFKTEITLANGE | | |
| | IRKRPLIETNGETGEIVWDKGRDFATVRKVLSMPQVNIV | | |
| | KKTEVQTGGFSKESILPKRNSDKLIARKKDWDPKKYGGF | | |
| | ESPTVAYSVLVVAKVEKGKSKKLKSVKELLGITIMERSS | | |
| | FEKNPIDFLEAKGYKEVKKDLIIKLPKYSLFELENGRKRM | | |
| | LASAGELQKGNELALPSKYVNFLYLASHYEKLKGSPEDN | | |
| | EQKQLFVEQHKHYLDEIIEQISEFSKRVILADANLDKVLS | | |
| | AYNKHRDKPIREQAENIIHLFTLTNLGAPAAFKYFDTTID | | |
| | RKRYTSTKEVLDATLIHQSITGLYETRIDLSQLGGD | | |
| Linker | GAGGGCGCCGAC | mRNA | 696 |
| between | | | |
| Cas9 | | | |
| nickase | EGAD | Protein | 697 |
| and NLS | | | |
| Nuclear | AAGCGGACCGCCGACGGCAGCGAGu′u′CGAGAGCCCC | mRNA | 698 |
| local- | AAGAAGAAGCGGAAGGu′Gu′GA | | |
| ization | KRTADGSEFESPKKKRKV | Protein | 699 |
| sequence | | | |
| (NLS) | | | |
| 3′ UTR | GCGGCCGCu′u′AAu′u′AAGCu′GCCu′u′Cu′GCGGGGCu′u | mRNA | 700 |
| | ′GCCu′u′Cu′GGCCAu′GCCCu′u′Cu′u′Cu′Cu′CCCu′u′GCA | | |
| | CCu′Gu′ACCu′Cu′u′GGu′Cu′u′u′GAAu′AAAGCCu′GAGu′ | | |
| | AGGAAGu′Cu′AGA | | |

MA079

| | | | |
|---|---|---|---|
| MA079 | AGGACu′CCu′CCCCAu′CCu′Cu′CCCu′Cu′Gu′CCCu′Cu′G | mRNA | 701 |
| | u′CCCu′Cu′GACCCu′GCACu′Gu′CCCAGCACCAu′GAGC | | |
| | GAGGu′GGAGu′u′CAGCCACGAGu′ACu′GGAu′GCGCCA | | |
| | CGCCCu′GACCCu′GGCCAAGCGCGCCCGCGACGAGCG | | |
| | CGAGGu′GCCCGu′GGGCGCCGu′GCu′GGu′GCu′GAACA | | |
| | ACCGCGu′GAu′CGGCGAGGGCu′GGAACCGCGCCAu′CG | | |
| | GCCu′GCACGACCCCACCGCCCACGCCGAGAu′CAu′GG | | |
| | CCCu′GCGCCAGGGCGGCCu′GGu′GAu′GCAGAACu′AC | | |
| | CGCCu′GAu′CGACGCCACCCu′Gu′ACGu′GACCu′u′CGA | | |
| | GCCCu′GCGu′GAu′Gu′GCGCCGGCGCCAu′GAu′CCACA | | |
| | GCCGCAu′CGGCCGCGu′GGu′Gu′u′CGGCGu′GCGCAAC | | |
| | GCCAAGACCGGCGCCGCCGGCAGCCu′GAu′GGACGu′G | | |
| | Cu′GCACCACCCCGGCAu′GAACCACCGCGu′GGAGAu′C | | |
| | ACCGAGGGCAu′CCu′GGCCGACGAGu′GCGCCGCCCu′G | | |
| | Cu′Gu′GCCGCu′u′Cu′u′CCGCAu′GCCCCGCCGCGu′Gu′u′ | | |
| | CAACGCCCAGAAGAAGGCCCAGAGCAGCACCGACAG | | |
| | CGGCGGCAGCAGCGGCGGCAGCAGCGGCAGCGAGAC | | |
| | ACCCGGCACCAGCGAGAGCGCCACCCCCGAGAGCAGC | | |
| | GGCGGCAGCAGCGGCGGCAGCGACAAGAAGu′ACAGC | | |
| | Au′CGGCCu′GGCCAu′CGGCACCAACAGCGu′GGGCu′G | | |
| | GGCCGu′GAu′CACCGACGAGu′ACAAGGu′GCCCAGCA | | |
| | AGAAGu′u′CAAGGu′GCu′GGGCAACACCGACCGCCAC | | |
| | AGCAu′CAAGAAGAACCu′GAu′CGGCGCCCu′GCu′Gu′u′ | | |
| | CGACAGCGGCGAGACAGCCGAGGCCACCCGCCu′GAA | | |
| | GCGCACCGCCCGCCGCCGCu′ACACCCGCCGCAAGAAC | | |
| | CGCAu′Cu′GCu′ACCu′GCAGGAGAu′Cu′u′CAGCAACGA | | |
| | GAu′GGCCAAGGu′GGACGACAGCu′u′Cu′u′CCACCGCCu | | |
| | ′GGAGGAGAGCu′u′CCu′GGu′GGAGGAGGACAAGAAGC | | |
| | ACGAGCGCCACCCCAu′Cu′u′CGGCAACAu′CGu′GGACG | | |
| | AGGu′GGCCu′ACCACGAGAAGu′ACCCCACCAu′Cu′ACC | | |
| | ACCu′GCGCAAGAAGCu′GGu′GGACAGCACCGACAAGG | | |
| | CCGACCu′GCGCCu′GAu′Cu′ACCu′GGCCCu′GGCCCACA | | |
| | u′GAu′CAAGu′u′CCGCGGCCACu′u′CCu′GAu′CGAGGGC | | |
| | GACCu′GAACCCCGACAACAGCGACGu′GGACAAGCu′G | | |
| | u′u′CAu′CCAGCu′GGu′GCAGACCu′ACAACCAGCu′Gu′u′ | | |
| | CGAGGAGAACCCCAu′CAACGCCAGCGGCGu′GGACGC | | |
| | CAAGGCCAu′CCu′GAGCGCCCGCCu′GAGCAAGAGCCG | | |
| | CCGCCu′GGAGAACCu′GAu′CGCCCAGCu′GCCCGGCGA | | |
| | GAAGAAGAACGGCCu′Gu′u′CGGCAACCu′GAu′CGCCCu | | |
| | ′GAGCCu′GGGCCu′GACCCCCAACu′u′CAAGAGCAACu′ | | |
| | u′CGACCu′GGCCGAGGACGCCAAGCu′GCAGCu′GAGCA | | |
| | AGGACACCu′ACGACGACGACCu′GGACAACCu′GCu′GG | | |
| | CCCAGAu′CGGCGACCAGu′ACGCCGACCu′Gu′u′CCu′G | | |
| | GCCGCCAAGAACCu′GAGCGACGCCAu′CCu′GCu′GAGC | | |
| | GACAu′CCu′GCGCGu′GAACACCGAGAu′CACCAAGGCC | | |
| | CCCCu′GAGCGCCAGCAu′GAu′CAAGCGCu′ACGACGAG | | |
| | CACCACCAGGACCu′GACCCu′GCu′GAAGGCCCu′GGu′G | | |
| | CGCCAGCAGCu′GCCCGAGAAGu′ACAAGGAGAu′Cu′u′ | | |
| | Cu′u′CGACCAGAGCAAGAACGGCu′ACGCCGGCu′ACAu | | |
| | ′CGACGGCGGCGCCAGCCAGGAGGAGu′u′Cu′ACAAGu′ | | |
| | u′CAu′CAAGCCCAu′CCu′GGAGAAGAu′GGACGGCACC | | |
| | GAGGAGCu′GCu′GGu′GAAGCu′GAACCGCGAGGACCu′ | | |
| | GCu′GCGCAAGCAGCGCACCu′u′CGACAACGGCAGCAu′ | | |
| | CCCCCACCAGAu′CCACCu′GGGCGAGCu′GCACGCCAu′ | | |
| | CCu′GCGCCGCCAGGAGGACu′u′Cu′ACCCCu′u′CCu′GA | | |
| | AGGACAACCGCGAGAAGAu′CGAGAAGAu′CCu′GACCu | | |
| | ′u′CCGCAu′CCCCu′ACu′ACGu′GGGCCCCCu′GGCCCGC | | |
| | GGCAACAGCCGCu′u′CGCCu′GGAu′GACCCGCAAGAGC | | |
| | GAGGAGACAAu′CACCCCCu′GGAACu′u′CGAGGAGGu′ | | |
| | GGu′GGACAAGGGCGCCAGCGCCCAGAGCu′u′CAu′CG | | |
| | AGCGCAu′GACCAACu′u′CGACAAGAACCu′GCCCAACG | | |
| | AGAAGGu′GCu′GCCCAAGCACAGCCu′GCu′Gu′ACGAGu | | |
| | ′ACu′u′CACCGu′Gu′ACAACGAGCu′GACCAAGGu′GAAG | | |
| | u′ACGu′GACCGAGGGCAu′GCGCAAGCCCGCCu′u′CCu′ | | |
| | GAGCGGCGAGCAGAAGAAGGCCAu′CGu′GGACCu′GCu | | |
| | ′Gu′u′CAAGACCAACCGCAAGGu′GACCGu′GAAGCAGC | | |
| | u′GAAGGAGGACu′ACu′u′CAAGAAGAu′CGAGu′GCu′u′ | | |
| | CGACAGCGu′GGAGAu′CAGCGGCGu′GGAGGACCGCu′u | | |
| | ′CAACGCCAGCCu′GGGCACCu′ACCACGACCu′GCu′GA | | |
| | AGAu′CAu′CAAGGACAAGGACu′u′CCu′GGACAACGAG | | |
| | GAGAACGAGGACAu′CCu′GGAGGACAu′CGu′GCu′GAC | | |
| | CCu′GACCCu′Gu′u′CGAGGACCGCGAGAu′GAu′CGAGG | | |
| | AGCGCCu′GAAGACCu′ACGCCCACCu′Gu′u′CGACGACA | | |
| | AGGu′GAu′GAAGCAGCu′GAAGCGCCGCCGCu′ACACC | | |
| | GGCu′GGGGCCGCCu′GAGCCGCAAGCu′GAu′CAACGGC | | |
| | Au′CCGCGACAAGCAGAGCGGCAAGACCAu′CCu′GGAC | | |
| | u′u′CCu′CAAGAGCGACGGCu′u′CGCCAACCGCAACu′u′ | | |
| | CAu′GCAGCu′GAu′CCACGACGACAGCCu′GACCu′u′CA | | |
| | AGGAGGACAu′CCAGAAGGCCCAGGu′GAGCGGCCAGG | | |
| | GCGACAGCCu′GCACGAGCACAu′CGCCAACCu′GGCCG | | |
| | GCAGCCCCGCCAu′CAAGAAGGGCAu′CCu′GCAGACCG | | |
| | u′GAAGGu′GGu′GGACGAGCu′GGu′GAAGGu′GAu′GGG | | |
| | CCGCCACAAGCCCGAGAACAu′CGu′GAu′CGAGAu′GGC | | |
| | CCGCGAGAACCAGACCACCCAGAAGGGCCAGAAGAA | | |
| | CAGCCGCGAGCGCAu′GAAGCGCAu′CGAGGAGGGCAu′ | | |
| | CAAGGAGCu′GGGCAGCCAGAu′CCu′GAAGGAGCACCC | | |
| | CGu′GGAGAACACCCAGCu′GCAGAACGAGAAGCu′Gu′ | | |
| | ACCu′Gu′ACu′ACCu′GCAGAACGGCCGCGACAu′Gu′AC | | |
| | Gu′GGACCAGGAGCu′GGACAu′CAACCGCCu′GAGCGA | | |
| | Cu′ACGACGu′GGACCACAu′CGu′GCCCCAGAGCu′u′CCu | | |
| | ′GAAGGACGACAGCAu′CGACAACAAGGu′GCu′GACCC | | |
| | GCAGCGACAAGAACCGCGGCAAGAGCGACAACGu′GC | | |
| | CCAGCGAGGAGGu′GGu′GAAGAAGAu′GAAGAACu′AC | | |
| | u′GGCGCCAGCu′GCu′GAACGCCAAGCu′GAu′CACCCA | | |
| | GCGCAAGu′u′CGACAACCu′GACCAAGGCCGAGCGCGG | | |
| | CGGCCu′GAGCGAGCu′GGACAAGGCCGGCu′u′CAu′CA | | |
| | AGCGCCAGCu′GGu′GGAGACACGCCAGAu′CACCAAGC | | |
| | ACGu′GGCCCAGAu′CCu′GGACAGCCGCAu′GAACACCA | | |
| | AGu′ACGACGAGAACGACAAGCu′GAu′CCGCGAGGu′G | | |
| | AAGGu′GAu′CACCCu′CAAGAGCAAGCu′GGu′GAGCGA | | |
| | Cu′u′CCGCAAGGACu′u′CCAGu′u′Cu′ACAAGGu′GCGCG | | |
| | AGAu′CAACAACu′ACCACCACGCCCACGACGCCu′ACC | | |
| | u′GAACGCCGu′GGu′GGGCACCGCCCu′GAu′CAAGAAGu | | |
| | ′ACCCCAAGCu′GGAGAGCGAGu′u′CGu′Gu′ACGGCGAC | | |
| | u′ACAAGGu′Gu′ACGACGu′GCGCAAGAu′GAu′CGCCAA | | |
| | GAGCGAGCAGGAGAu′CGGCAAGGCCACCGCCAAGu′A | | |
| | Cu′u′Cu′u′Cu′ACAGCAACAu′CAu′GAACu′u′Cu′u′CAAG | | |
| | ACCGAGAu′CACCCu′GGCCAACGGCGAGAu′CCGCAAG | | |
| | CGCCCCCu′GAu′CGAGACAAACGGCGAGACAGGCGAG | | |
| | Au′CGu′Gu′GGGACAAGGGCCGCGACu′u′CGCCACCGu′ | | |
| | GCGCAAGGu′GCu′GAGCAu′GCCCCAGGu′GAACAu′CGu | | |
| | ′GAAGAAGACCGAGGu′GCAGACCGGCGGCu′u′CAGCA | | |
| | AGGAGAGCAu′CCu′GCCCAAGCGCAACAGCGACAAGC | | |
| | u′GAu′CGCCCGCAAGAAGGACu′GGGACCCCAAGAAGu | | |
| | ′ACGGCGGCu′u′CGACAGCCCCACCGu′GGCCu′ACAGC | | |
| | Gu′GCu′GGu′GGu′GGCCAAGGu′GGAGAAGGGCAAGAG | | |
| | CAAGAAGCu′CAAGAGCGu′GAAGGAGCu′GCu′GGGCA | | |
| | u′CACCAu′CAu′GGAGCGCAGCAGCu′u′CGAGAAGAAC | | |
| | CCCAu′CGACu′u′CCu′GGAGGCCAAGGGCu′ACAAGGA | | |
| | GGu′GAAGAAGGACCu′GAu′CAu′CAAGCu′GCCCAAGu′ | | |
| | ACAGCCu′Gu′u′CGAGCu′GGAGAACGGCCGCAAGCGC | | |
| | Au′GCu′GGCCAGCGCCGGCGAGCu′GCAGAAGGGCAAC | | |
| | GAGCu′GGCCCu′GCCCAGCAAGu′ACGu′GAACu′u′CCu′ | | |
| | Gu′ACCu′GGCCAGCCACu′ACGAGAAGCu′GAAGGGCA | | |
| | GCCCCGAGGACAACGAGCAGAAGCAGCu′Gu′u′CGu′G | | |
| | GAGCAGCACAAGCACu′ACCu′GGACGAGAu′CAu′CGA | | |
| | GCAGAu′CAGCGAGu′u′CAGCAAGCGCGu′GAu′CCu′GG | | |
| | CCGACGCCAACCu′GGACAAGGu′GCu′GAGCGCCu′ACA | | |
| | ACAAGCACCGCGACAAGCCCAu′CCGCGAGCAGGCCG | | |
| | AGAACAu′CAu′CCACCu′Gu′u′CACCCu′GACCAACCu′G | | |
| | GGCGCCCCCGCCGCCu′u′CAAGu′ACu′u′CGACACCACC | | |
| | Au′CGACCGCAAGCGCu′ACACCAGCACCAAGGAGGu′G | | |
| | Cu′GGACGCCACCCu′GAu′CCACCAGAGCAu′CACCGGC | | |
| | Cu′Gu′ACGAGACACGCAu′CGACCu′GAGCCAGCu′GGG | | |
| | CGGCGACGAGGGCGCCGACAAGCGCACCGCCGACGG | | |
| | CAGCGAGu′u′CGAGAGCCCCAAGAAGAAGCGCAAGGu | | |
| | ′Gu′AAAGu′Gu′CCAGACCAu′u′Gu′Cu′u′CCAACCCCAG | | |
| | Cu′GGCCu′Cu′AGAACACCCACu′GGCCAGu′CCu′AGAG | | |
| | Cu′CCu′Gu′CCCu′ACCCACu′Cu′u′u′GCu′ACAAu′AAAu′G | | |
| | Cu′GAAu′GAAu′CCAu′Cu′AGA | | |
| | MSEVEFSHEYWMRHALTLAKRARDEREVPVGAVLVLN | Protein | 702 |
| | NRVIGEGWNRAIGLHDPTAHAEIMALRQGGLVMQNYRL | | |
| | IDATLYVTFEPCVMCAGAMIHSRIGRVVFGVRNAKTGA | | |
| | AGSLMDVLHHPGMNHR VEITEGILADECAALLCRFFRMP | | |
| | RRVFNAQKKAQSSTDSGGSSGGSSGSETPGTSESATPESS | | |
| | GGSSGGSDKKYSIGLAIGTNSVGWAVITDEYKVPSKKFK | | |
| | VLGNTDRHSIKKNLIGALLFDSGETAEATRLKRTARRRY | | |
| | TRRKNRICYLQEIFSNEMAKVDDSFFHRLEESFLVEEDKK | | |
| | HERHPIFGNIVDEVAYHEKYPTIYHLRKKLVDSTDKADL | | |
| | RLIYLALAHMIKFRGHFLIEGDLNPDNSDVDKLFIQLVQT | | |
| | YNQLFEENPINASGVDAKAILSARLSKSRRLENLIAQLPG | | |
| | EKKNGLFGNLIALSLGLTPNFKSNFDLAEDAKLQLSKDT | | |
| | YDDDLDNLLAQIGDQYADLFLAAKNLSDAILLSDILRVN | | |
| | TEITKAPLSASMIKRYDEHHQDLTLLKALVRQQLPEKYK | | |
| | EIFFDQSKNGYAGYIDGGASQEEFYKFIKPILEKMDGTEE | | |
| | LLVKLNREDLLRKQRTFDNGSIPHQIHLGELHAILRRQED | | |
| | FYPFLKDNREKIEKILTFRIPYYVGPLARGNSRFAWMTRK | | |
| | SEETITPWNFEEVVDKGASAQSFIERMTNFDKNLPNEKV | | |
| | LPKHSLLYEYFTVYNELTKVKYVTEGMRKPAFLSGEQK | | |
| | KAIVDLLFKTNRKVTVKQLKEDYFKKIECFDSVEISGVED | | |
| | RFNASLGTYHDLLKIIKDKDFLDNEENEDILEDIVLTLTLF | | |
| | EDREMIEERLKTYAHLFDDKVMKQLKRRRYTGWGRLSR | | |
| | KLINGIRDKQSGKTILDFLKSDGFANRNFMQLIHDDSLTF | | |
| | KEDIQKAQVSGQGDSLHEHIANLAGSPAIKKGILQTVKV | | |
| | VDELVKVMGRHKPENIVIEMARENQTTQKGQKNSRERM | | |
| | KRIEEGIKELGSQILKEHPVENTQLQNEKLYLYYLQNGR | | |
| | DMYVDQELDINRLSDYDVDHIVPQSFLKDDSIDNKVLTR | | |
| | SDKNRGKSDNVPSEEVVKKMKNYWRQLLNAKLITQRKF | | |
| | DNLTKAERGGLSELDKAGFIKRQLVETRQITKHVAQILD | | |
| | SRMNTKYDENDKLIREVKVITLKSKLVSDFRKDFQFYKV | | |
| | REINNYHHAHDAYLNAVVGTALIKKYPKLESEFVYGDY | | |
| | KVYDVRKMIAKSEQEIGKATAKYFFYSNIMNFFKTEITL | | |
| | ANGEIRKRPLIETNGETGEIVWDKGRDFATVRKVLSMPQ | | |
| | VNIVKKTEVQTGGFSKESILPKRNSDKLIARKKDWDPKK | | |
| | YGGFDSPTVAYSVLVVAKVEKGKSKKLKSVKELLGITIM | | |
| | ERSSFEKNPIDFLEAKGYKEVKKDLIIKLPKYSLFELENGR | | |
| | KRMLASAGELQKGNELALPSKYVNFLYLASHYEKLKGS | | |
| | PEDNEQKQLFVEQHKHYLDEIIEQISEFSKRVILADANLD | | |
| | KVLSAYNKHRDKPIREQAENIIHLFTLTNLGAPAAFKYFD | | |
| | TTIDRKRYTSTKEVLDATLIHQSITGLYETRIDLSQLGGDE | | |
| | GADKRTADGSEFESPKKKRKV | | |
| 5′ UTR | AGGACu′CCu′CCCCAu′CCu′Cu′CCCu′Cu′Gu′CCCu′Cu′G | mRNA | 703 |
| | u′CCCu′Cu′GACCCu′GCACu′Gu′CCCAGCACC | | |
| TadA | Au′GAGCGAGGu′GGAGu′u′CAGCCACGAGu′ACu′GGAu′ | mRNA | 704 |
| | GCGCCACGCCCu′GACCCu′GGCCAAGCGCGCCCGCGA | | |
| | CGAGCGCGAGGu′GCCCGu′GGGCGCCGu′GCu′GGu′GCu | | |
| | ′GAACAACCGCGu′GAu′CGGCGAGGGCu′GGAACCGCG | | |
| | CCAu′CGGCCu′GCACGACCCCACCGCCCACGCCGAGAu | | |
| | ′CAu′GGCCCu′GCGCCAGGGCGGCCu′GGu′GAu′GCAGA | | |
| | ACu′ACCGCCu′GAu′CGACGCCACCCu′Gu′ACGu′GACCu | | |
| | ′u′CGAGCCCu′GCGu′GAu′Gu′GCGCCGGCGCCAu′GAu′C | | |
| | CACAGCCGCAu′CGGCCGCGu′GGu′Gu′u′CGGCGu′GCG | | |
| | CAACGCCAAGACCGGCGCCGCCGGCAGCCu′GAu′GGA | | |
| | CGu′GCu′GCACCACCCCGGCAu′GAACCACCGCGu′GGA | | |
| | GAu′CACCGAGGGCAu′CCu′GGCCGACGAGu′GCGCCGC | | |
| | CCu′GCu′Gu′GCCGCu′u′Cu′u′CCGCAu′GCCCCGCCGCGu | | |
| | ′Gu′u′CAACGCCCAGAAGAAGGCCCAGAGCAGCACCG | | |
| | AC | | |
| | MSEVEFSHEYWMRHALTLAKRARDEREVPVGAVLVLN | Protein | 705 |
| | NRVIGEGWNRAIGLHDPTAHAEIMALRQGGLVMQNYRL | | |
| | IDATLYVTFEPCVMCAGAMIHSRIGRVVFGVRNAKTGA | | |
| | AGSLMDVLHHPGMNHRVEITEGILADECAALLCRFFRMP | | |
| | RRVFNAQKKAQSSTD | | |
| Linker | AGCGGCGGCAGCAGCGGCGGCAGCAGCGGCAGCGAG | mRNA | 692 |
| between | ACACCCGGCACCAGCGAGAGCGCCACCCCCGAGAGCA | | |
| TadA | GCGGCGGCAGCAGCGGCGGCAGC | | |
| and Cas9 | SGGSSGGSSGSETPGTSESATPESSGGSSGGS | Protein | 693 |
| nickase | | | |
| Cas9 | GACAAGAAGu′ACAGCAu′CGGCCu′GGCCAu′CGGCACC | mRNA | 706 |
| nickase | AACAGCGu′GGGCu′GGGCCGu′GAu′CACCGACGAGu′A | | |
| | CAAGGu′GCCCAGCAAGAAGu′u′CAAGGu′GCu′GGGCA | | |
| | ACACCGACCGCCACAGCAu′CAAGAAGAACCu′GAu′CG | | |
| | GCGCCCu′GCu′Gu′u′CGACAGCGGCGAGACAGCCGAGG | | |
| | CCACCCGCCu′GAAGCGCACCGCCCGCCGCCGCu′ACAC | | |
| | CCGCCGCAAGAACCGCAu′Cu′GCu′ACCu′GCAGGAGAu | | |
| | ′Cu′u′CAGCAACGAGAu′GGCCAAGGu′GGACGACAGCu′ | | |
| | u′Cu′u′CCACCGCCu′GGAGGAGAGCu′u′CCu′GGu′GGAG | | |
| | GAGGACAAGAAGCACGAGCGCCACCCCAu′Cu′u′CGGC | | |
| | AACAu′CGu′GGACGAGGu′GGCCu′ACCACGAGAAGu′A | | |
| | CCCCACCAu′Cu′ACCACCu′GCGCAAGAAGCu′GGu′GGA | | |
| | CAGCACCGACAAGGCCGACCu′GCGCCu′GAu′Cu′ACCu′ | | |
| | GGCCCu′GGCCCACAu′GAu′CAAGu′u′CCGCGGCCACu′u | | |
| | ′CCu′GAu′CGAGGGCGACCu′GAACCCCGACAACAGCG | | |
| | ACGu′GGACAAGCu′Gu′u′CAu′CCAGCu′GGu′GCAGACC | | |
| | u′ACAACCAGCu′Gu′u′CGAGGAGAACCCCAu′CAACGC | | |
| | CAGCGGCGu′GGACGCCAAGGCCAu′CCu′GAGCGCCCG | | |
| | CCu′GAGCAAGAGCCGCCGCCu′GGAGAACCu′GAu′CGC | | |
| | CCAGCu′GCCCGGCGAGAAGAAGAACGGCCu′Gu′u′CG | | |
| | GCAACCu′GAu′CGCCCu′GAGCCu′GGGCCu′GACCCCCA | | |
| | ACu′u′CAAGAGCAACu′u′CGACCu′GGCCGAGGACGCC | | |
| | AAGCu′GCAGCu′GAGCAAGGACACCu′ACGACGACGAC | | |
| | Cu′GGACAACCu′GCu′GGCCCAGAu′CGGCGACCAGu′A | | |
| | CGCCGACCu′Gu′u′CCu′GGCCGCCAAGAACCu′GAGCGA | | |
| | CGCCAu′CCu′GCu′GAGCGACAu′CCu′GCGCGu′GAACA | | |
| | CCGAGAu′CACCAAGGCCCCCCu′GAGCGCCAGCAu′GA | | |
| | u′CAAGCGCu′ACGACGAGCACCACCAGGACCU′GACCC | | |
| | u′GCu′GAAGGCCCu′GGu′GCGCCAGCAGCu′GCCCGAG | | |
| | AAGu′ACAAGGAGAu′Cu′u′Cu′u′CGACCAGAGCAAGAA | | |
| | CGGCu′ACGCCGGCu′ACAu′CGACGGCGGCGCCAGCCA | | |
| | GGAGGAGu′u′Cu′ACAAGu′u′CAu′CAAGCCCAu′CCu′GG | | |
| | AGAAGAu′GGACGGCACCGAGGAGCu′GCu′GGu′GAAG | | |
| | Cu′GAACCGCGAGGACCu′GCu′GCGCAAGCAGCGCACC | | |
| | u′u′CGACAACGGCAGCAu′CCCCCACCAGAu′CCACCu′G | | |
| | GGCGAGCu′GCACGCCAu′CCu′GCGCCGCCAGGAGGAC | | |
| | u′u′Cu′ACCCCu′u′CCu′GAAGGACAACCGCGAGAAGAu′ | | |
| | CGAGAAGAu′CCu′GACCu′u′CCGCAu′CCCCu′ACu′ACGu | | |
| | ′GGGCCCCCu′GGCCCGCGGCAACAGCCGCu′u′CGCCu′ | | |
| | GGAu′GACCCGCAAGAGCGAGGAGACAAu′CACCCCCu′ | | |
| | GGAACu′u′CGAGGAGGu′GGu′GGACAAGGGCGCCAGC | | |
| | GCCCAGAGCu′u′CAu′CGAGCGCAu′GACCAACu′u′CGA | | |
| | CAAGAACCu′GCCCAACGAGAAGGu′GCu′GCCCAAGCA | | |
| | CAGCCu′GCu′Gu′ACGAGu′ACu′u′CACCGu′Gu′ACAACG | | |
| | AGCu′GACCAAGGu′GAAGu′ACGu′GACCGAGGGCAu′G | | |
| | CGCAAGCCCGCCu′u′CCu′GAGCGGCGAGCAGAAGAAG | | |
| | GCCAu′CGu′GGACCu′GCu′Gu′u′CAAGACCAACCGCAA | | |
| | GGu′GACCGu′GAAGCAGCu′GAAGGAGGACu′ACu′u′CA | | |
| | AGAAGAu′CGAGu′GCu′u′CGACAGCGu′GGAGAu′CAGC | | |
| | GGCGu′GGAGGACCGCu′u′CAACGCCAGCCu′GGGCACC | | |
| | u′ACCACGACCu′GCu′GAAGAu′CAu′CAAGGACAAGGA | | |
| | Cu′u′CCu′GGACAACGAGGAGAACGAGGACAu′CCu′GG | | |
| | AGGACAu′CGu′GCu′GACCCu′GACCCu′Gu′u′CGAGGAC | | |
| | CGCGAGAu′GAu′CGAGGAGCGCCu′GAAGACCu′ACGC | | |
| | CCACCu′Gu′u′CGACGACAAGGu′GAu′GAAGCAGCu′GA | | |
| | AGCGCCGCCGCu′ACACCGGCu′GGGGCCGCCu′GAGCC | | |
| | GCAAGCu′GAu′CAACGGCAu′CCGCGACAAGCAGAGCG | | |
| | GCAAGACCAu′CCu′GGACu′u′CCu′CAAGAGCGACGGCu | | |
| | ′u′CGCCAACCGCAACu′u′CAu′GCAGCu′GAu′CCACGAC | | |
| | GACAGCCu′GACCu′u′CAAGGAGGACAu′CCAGAAGGC | | |
| | CCAGGu′GAGCGGCCAGGGCGACAGCCu′GCACGAGCA | | |
| | CAu′CGCCAACCu′GGCCGGCAGCCCCGCCAu′CAAGAA | | |
| | GGGCAu′CCu′GCAGACCGu′GAAGGu′GGu′GGACGAGC | | |
| | u′GGu′GAAGGu′GAu′GGGCCGCCACAAGCCCGAGAAC | | |
| | Au′CGu′GAu′CGAGAu′GGCCCGCGAGAACCAGACCACC | | |
| | CAGAAGGGCCAGAAGAACAGCCGCGAGCGCAu′GAAG | | |
| | CGCAu′CGAGGAGGGCAu′CAAGGAGCu′GGGCAGCCA | | |
| | GAu′CCu′GAAGGAGCACCCCGu′GGAGAACACCCAGCu′ | | |
| | GCAGAACGAGAAGCu′Gu′ACCu′Gu′ACu′ACCu′GCAGA | | |
| | ACGGCCGCGACAu′Gu′ACGu′GGACCAGGAGCu′GGAC | | |
| | Au′CAACCGCCu′GAGCGACu′ACGACGu′GGACCACAu′ | | |
| | CGu′GCCCCAGAGCu′u′CCu′GAAGGACGACAGCAu′CG | | |
| | ACAACAAGGu′GCu′GACCCGCAGCGACAAGAACCGCG | | |
| | GCAAGAGCGACAACGu′GCCCAGCGAGGAGGu′GGu′G | | |
| | AAGAAGAu′GAAGAACu′ACu′GGCGCCAGCu′GCu′GAA | | |
| | CGCCAAGCu′GAu′CACCCAGCGCAAGu′u′CGACAACCu′ | | |
| | GACCAAGGCCGAGCGCGGCGGCCu′GAGCGAGCu′GGA | | |
| | CAAGGCCGGCu′u′CAu′CAAGCGCCAGCu′GGu′GGAGA | | |
| | CACGCCAGAu′CACCAAGCACGu′GGCCCAGAu′CCu′GG | | |
| | ACAGCCGCAu′GAACACCAAGu′ACGACGAGAACGACA | | |
| | AGCu′GAu′CCGCGAGGu′GAAGGu′GAu′CACCCu′CAAG | | |
| | AGCAAGCu′GGu′GAGCGACu′u′CCGCAAGGACu′u′CCA | | |
| | Gu′u′Cu′ACAAGGu′GCGCGAGAu′CAACAACu′ACCACC | | |
| | ACGCCCACGACGCCu′ACCu′GAACGCCGu′GGu′GGGCA | | |
| | CCGCCCu′GAu′CAAGAAGu′ACCCCAAGCu′GGAGAGCG | | |
| | AGu′u′CGu′Gu′ACGGCGACu′ACAAGGu′Gu′ACGACGu′G | | |
| | CGCAAGAu′GAu′CGCCAAGAGCGAGCAGGAGAu′CGG | | |
| | CAAGGCCACCGCCAAGu′ACu′u′Cu′u′Cu′ACAGCAACAu | | |
| | ′CAu′GAACu′u′Cu′u′CAAGACCGAGAu′CACCCu′GGCCA | | |
| | ACGGCGAGAu′CCGCAAGCGCCCCCu′GAu′CGAGACAA | | |
| | ACGGCGAGACAGGCGAGAu′CGu′Gu′GGGACAAGGGC | | |
| | CGCGACu′u′CGCCACCGu′GCGCAAGGu′GCu′GAGCAu′ | | |
| | GCCCCAGGu′GAACAu′CGu′GAAGAAGACCGAGGu′GC | | |
| | AGACCGGCGGCu′u′CAGCAAGGAGAGCAu′CCu′GCCCA | | |
| | AGCGCAACAGCGACAAGCu′GAu′CGCCCGCAAGAAGG | | |
| | ACu′GGGACCCCAAGAAGu′ACGGCGGCu′u′CGACAGCC | | |
| | CCACCGu′GGCCu′ACAGCGu′GCu′GGu′GGu′GGCCAAG | | |
| | Gu′GGAGAAGGGCAAGAGCAAGAAGCu′CAAGAGCGu′ | | |
| | GAAGGAGCu′GCu′GGGCAu′CACCAu′CAu′GGAGCGCA | | |
| | GCAGCu′u′CGAGAAGAACCCCAu′CGACu′u′CCu′GGAG | | |
| | GCCAAGGGCu′ACAAGGAGGu′GAAGAAGGACCu′GAu′ | | |
| | CAu′CAAGCu′GCCCAAGu′ACAGCCu′Gu′u′CGAGCu′GG | | |
| | AGAACGGCCGCAAGCGCAu′GCu′GGCCAGCGCCGGCG | | |
| | AGCu′GCAGAAGGGCAACGAGCu′GGCCCu′GCCCAGCA | | |
| | AGu′ACGu′GAACu′u′CCu′Gu′ACCu′GGCCAGCCACu′AC | | |
| | GAGAAGCu′GAAGGGCAGCCCCGAGGACAACGAGCAG | | |
| | AAGCAGCu′Gu′u′CGu′GGAGCAGCACAAGCACu′ACCu′ | | |
| | GGACGAGAu′CAu′CGAGCAGAu′CAGCGAGu′u′CAGCA | | |
| | AGCGCGu′GAu′CCu′GGCCGACGCCAACCu′GGACAAGG | | |
| | u′GCu′GAGCGCCu′ACAACAAGCACCGCGACAAGCCCA | | |
| | u′CCGCGAGCAGGCCGAGAACAu′CAu′CCACCu′Gu′u′C | | |
| | ACCCu′GACCAACCu′GGGCGCCCCCGCCGCCu′u′CAAG | | |
| | u′ACu′u′CGACACCACCAu′CGACCGCAAGCGCu′ACACC | | |
| | AGCACCAAGGAGGu′GCu′GGACGCCACCCu′GAu′CCAC | | |
| | CAGAGCAu′CACCGGCCu′Gu′ACGAGACACGCAu′CGAC | | |
| | Cu′GAGCCAGCu′GGGCGGCGAC | | |
| | DKKYSIGLAIGTNSVGWAVITDEYKVPSKKFKVLGNTDR | Protein | 707 |
| | HSIKKNLIGALLFDSGETAEATRLKRTARRRYTRRKNRIC | | |
| | YLQEIFSNEMAKVDDSFFHRLEESFLVEEDKKHERHPIFG | | |
| | NIVDEVAYHEKYPTIYHLRKKLVDSTDKADLRLIYLALA | | |
| | HMIKFRGHFLIEGDLNPDNSDVDKLFIQLVQTYNQLFEE | | |
| | NPINASGVDAKAILSARLSKSRRLENLIAQLPGEKKNGLF | | |
| | GNLIALSLGLTPNFKSNFDLAEDAKLQLSKDTYDDDLDN | | |
| | LLAQIGDQYADLFLAAKNLSDAILLSDILRVNTEITKAPL | | |
| | SASMIKRYDEHHQDLTLLKALVRQQLPEKYKEIFFDQSK | | |
| | NGYAGYIDGGASQEEFYKFIKPILEKMDGTEELLVKLNR | | |
| | EDLLRKQRTFDNGSIPHQIHLGELHAILRRQEDFYPFLKD | | |
| | NREKIEKILTFRIPYYVGPLARGNSRFAWMTRKSEETITP | | |
| | WNFEEVVDKGASAQSFIERMTNFDKNLPNEKVLPKHSLL | | |
| | YEYFTVYNELTKVKYVTEGMRKPAFLSGEQKKAIVDLL | | |
| | FKTNRKVTVKQLKEDYFKKIECFDSVEISGVEDRFNASL | | |
| | GTYHDLLKIIKDKDFLDNEENEDILEDIVLTLTLFEDREMI | | |
| | EERLKTYAHLFDDKVMKQLKRRRYTGWGRLSRKLINGI | | |
| | RDKQSGKTILDFLKSDGFANRNFMQLIHDDSLTFKEDIQ | | |
| | KAQVSGQGDSLHEHIANLAGSPAIKKGILQTVKVVDELV | | |
| | KVMGRHKPENIVIEMARENQTTQKGQKNSRERMKRIEE | | |
| | GIKELGSQILKEHPVENTQLQNEKLYLYYLQNGRDMYV | | |
| | DQELDINRLSDYDVDHIVPQSFLKDDSIDNKVLTRSDKN | | |
| | RGKSDNVPSEEVVKKMKNYWRQLLNAKLITQRKFDNLT | | |
| | KAERGGLSELDKAGFIKRQLVETRQITKHVAQILDSRMN | | |
| | TKYDENDKLIREVKVITLKSKLVSDFRKDFQFYKVREIN | | |
| | NYHHAHDAYLNAVVGTALIKKYPKLESEFVYGDYKVY | | |
| | DVRKMIAKSEQEIGKATAKYFFYSNIMNFFKTEITLANGE | | |
| | IRKRPLIETNGETGEIVWDKGRDFATVRKVLSMPQVNIV | | |
| | KKTEVQTGGFSKESILPKRNSDKLIARKKDWDPKKYGGF | | |
| | DSPTVAYSVLVVAKVEKGKSKKLKSVKELLGITIMERSS | | |
| | FEKNPIDFLEAKGYKEVKKDLIIKLPKYSLFELENGRKRM | | |
| | LASAGELQKGNELALPSKYVNFLYLASHYEKLKGSPEDN | | |
| | EQKQLFVEQHKHYLDEIIEQISEFSKRVILADANLDKVLS | | |
| | AYNKHRDKPIREQAENIIHLFTLTNLGAPAAFKYFDTTID | | |
| | RKRYTSTKEVLDATLIHQSITGLYETRIDLSQLGGD | | |
| Linker | GAGGGCGCCGAC | mRNA | 696 |
| between | EGAD | Protein | 697 |
| Cas9 | | | |
| nickase | | | |
| and NLS | | | |
| Nuclear | AAGCGCACCGCCGACGGCAGCGAGu′u′CGAGAGCCCC | mRNA | 708 |
| local- | AAGAAGAAGCGCAAGGu′G | | |
| ization | KRTADGSEFESPKKKRKV | Protein | 709 |
| sequence | | | |
| (NLS) | | | |
| 3′ UTR | AGu′Gu′CCAGACCAu′u′Gu′Cu′u′CCAACCCCAGCu′GGC | mRNA | 710 |
| | Cu′Cu′AGAACACCCACu′GGCCAGu′CCu′AGAGCu′CCu′ | | |
| | Gu′CCCu′ACCCACu′Cu′u′u′GCu′ACAAu′AAAu′GCu′GAA | | |
| | u′GAAu′CCAu′Cu′AGA | | |

The mutations at amino acid positions 691 and 1135 of the nCas9 component and their corresponding nucleotide sequences are indicated as bold and underlined.
u′: N¹-methylpseudouridine
The first nucleotide in the 5′ UTR has a 2′-O-methyl modification.

### Example 14. Exemplary LNP Formulations

[0584] LNP formulations are shown in Table 11. GalNAc-LNP formulation parameters and characteristics using 1004 as GalNAc-lipid, except 7-95 through 7-98, and 7-109 through 7-111. 7-95 was 1044; 7-96 and 7-109 were 1002; 7-97 and 7-110 were 1014; and 7-98 and 7-111 were 1078. 1004 or another indicated GalNAc-lipid was added to the formulation process in the mixture of lipids (e.g. ionizable lipid, stealth lipid and helper lipid) in ethanol, except where indicated post addition was used. The amino lipid 502 was used for all LNP IDs except 7-78, and 7-80 to 7-86, which used amino lipid VL422. The LNP composition varies in all examples. Different formulation buffers of choice at different pH were used for the LNP preparation whereas final formulation buffer pH was maintained in 6-8 range. All the GalNAc-LNPs were carrying mRNA MA004 and gRNA GA256 at 1:1 weight ratio, except 7-64, 7-65, 7-87 through 7-98, and 7-105 through 7-111 where the gRNA used was gRNA GA260, and 7-78 to 7-86 which used gRNA GA257. For the preparation of LNP 7-77, cross mixing and TFF were used.

[chemical structure]

[chemical structure]

[0585] It is to be understood that lipid mix addition method refers to a method, wherein one channel/line was used for delivering the lipid mixture (including but not limited to: ionizable lipid, stealth lipid, and helper lipid) to a mixing chamber. The GalNAc-Lipid 1004 was included in the lipid excipients channel such that the final mol % of the GalNAc-Lipid in the LNPs was in the range of 0.01-10%. The second channel/line was used to deliver the cargo dissolved in an aqueous solution (including but not limited to: guide RNA and mRNA). The lipid and RNA channels mixed in a mixing device of desired geometry (e.g. T mixer, Cross Mixer, among others). The dilution buffer was then introduced through a downstream second mixer (T mixer, cross mixer, among others) to the resulting ethanol/aqueous mix to produce the desired LNPs. The LNPs thus produced were allowed to stand for 1 min to 120 min before being buffer exchanged into the final formulation buffer and stored. The buffer exchange occurred via PD-10 column, dialysis, or TFF.

[0586] It is to be understood that Inline Dilution method refers to a method, wherein one channel delivered the lipid mixture (including but not limited to: ionizable lipid, stealth lipid, helper lipid, etc.). The second channel/line was used to deliver the cargo dissolved in an aqueous solution (including but not limited to: guide RNA and mRNA). The lipid and RNA channels mix in a mixing device of desired geometry (e.g. T mixer, Cross Mixer, among others). The GalNAc-Lipid 1004 was included in the dilution buffer such that the final mol % of the GalNAc-Lipid in the LNPs is in the range of 0.01-10%. The dilution buffer containing the desired amount of the GalNAc-Lipid was then immediately introduced to the resulting ethanol/aqueous mix through a third channel to produce the desired LNPs. The LNPs were allowed to stand for 1 min to 120 min before being buffer exchanged into the final formulation buffer and was stored. The buffer exchange occurred via PD-10 column, dialysis, or TFF.

TABLE 11

| | Excipient mol % | Drug | | Z | | | 1004 |
|---|---|---|---|---|---|---|---|
| LNP | 502/Cholesterol/ | Product | | average | | Encapsulation | Addition |
| ID | DSPC/507/1004 | Buffer | Storage | (nm) | PDI | (%) | Method |
| 7-42 | 55/38.4/4.7/1.6/0.3 | Tris | 2-4C | 105.405 | 0.082 | 95.57 | Inline Dilution |
| 7-43 | 55/37.7/4.7/2.1/0.5 | Tris | 2-4C | 89.59 | 0.048 | 95.16 | Inline Dilution |
| 7-44 | 55/38.6/4.7/1.6/0.1 | PBS | 2-4C | 96.47 | 0.021 | 94.48 | Lipid Mix |
| 7-45 | 55/38.5/4.7/1.6/0.2 | PBS | 2-4C | 90.54 | 0.094 | 94.76 | Lipid Mix |
| 7-46 | 55/38.4/4.7/1.6/0.3 | PBS | 2-4C | 92.28 | 0.077 | 95.35 | Lipid Mix |
| 7-47 | 55/38.3/4.7/1.6/0.4 | PBS | 2-4C | 92.03 | 0.01 | 95.6 | Lipid Mix |
| 7-48 | 55/38.2/4.7/1.6/0.5 | PBS | 2-4C | 83.4 | 0.065 | 94.99 | Lipid Mix |
| 7-55 | 55/38.2/4.7/2.1/0.5 | PBS | 2-4C | 88.37 | 0.051 | 95.1 | Lipid Mix |
| 7-49 | 55/38.6/4.7/1.6/0.1 | PBS | 2-4C | 124.1 | 0.0918 | 93.6 | Post Addition |
| 7-50 | 55/38.65/4.7/1.6/0.50 | PBS | 2-4C | 138 | 0.1133 | 93.4 | Lipid Mix |
| 7-51 | 55/38.95/4.7/1.3/0.05 | PBS | 2-4C | 117.7 | 0.01225 | 92.8 | Lipid Mix |
| 7-52 | 55/38.9/4.7/1.3/0.1 | PBS | 2-4C | 133.2 | 0.04513 | 91.4 | Lipid Mix |
| 7-53 | 55/38.8/4.7/1.3/0.2 | PBS | 2-4C | 117.2 | 0.02134 | 93.5 | Lipid Mix |
| 7-54 | 55/38.7/4.7/1.3/0.3 | PBS | 2-4C | 107 | 0.0641 | 93.4 | Lipid Mix |
| 7-56 | 55/38.15/4.7/2.1/0.05 | PBS | 2-4C | 73.8 | 0.01 | 95.14 | Lipid Mix |
| 7-57 | 55/38.675/4.7/1.6/0.025 | PBS | 2-4C | 86.04 | 0.022 | 94.18 | Lipid Mix |
| 7-58 | 55/38.69/4.7/1.6/0.01 | PBS | 2-4C | 87.2 | 0.036 | 93.9 | Lipid Mix |
| 7-59 | 55/38.975/4.7/1.3/0.025 | PBS | 2-4C | 93.24 | 0.06 | 93.91 | Lipid Mix |
| 7-64 | 55/38.65/4.7/1.6/0.05 | PBS | 2-4C | 103.4 | 0.01883 | 95.97 | Lipid Mix |
| 7-65 | 55/38.15/4.7/2.1/0.05 | Tris | 2-4C | 102.2 | 0.01135 | 92.55 | Lipid Mix |
| 7-66 | 55/38.15/4.7/2.1/0.05 | Tris | 2-4C | 101 | 0.05521 | 95.51 | Lipid Mix |
| 7-67 | 55/37.25/4.7/3/0.05 | Tris | 2-4C | 91.23 | 0.03484 | 90.36 | Lipid Mix |
| 7-68 | 52.4/34.55/10/3/0.05 | Tris | 2-4C | 86.79 | 0.04927 | 91.13 | Lipid Mix |
| 7-69 | 55/38.15/4.7/3/0.05 | Tris | 2-4C | 103.5 | 0.007838 | 89.49 | Lipid Mix |
| 7-70 | 52.4/34.55/10/3/0.05 | Tris | 2-4C | 70.94 | 0.07394 | 93.09 | Lipid Mix |
| 7-71 | 50/37.95/9/3/0.05 | Tris | 2-4C | 72.3 | 0.04853 | 92.23 | Lipid Mix |
| 7-72 | 47/40.95/9/3/0.05 | Tris | 2-4C | 66.33 | 0.05201 | 92.98 | Lipid Mix |
| 7-74 | 50/37.95/9/3/0.05 | Tris | 2-4C | 67.91 | 0.08725 | 91.48 | Lipid Mix |
| 7-75 | 50/37.95/9/3/0.05 | Tris | 2-4C | 82.7 | 0.2582 | 91.36 | Lipid Mix |
| 7-77 | 50/37.95/9/3/0.05 | Tris | 2-4C | 70.22 | 0.06838 | 91.57 | Lipid Mix |
| 7-78 | 50/38/9/3/0 | Tris | 2-4C | 66.85 | 0.06473 | 93.53 | Control |
| 7-79 | 50/37.95/9/3/0.05 | Tris | 2-4C | 70.9 | 0.1017 | 95.23 | Lipid Mix |
| 7-80 | 50/37.99/9/3/0.01 | Tris | 2-4C | 66.91 | 0.05535 | 93.6 | Lipid Mix |
| 7-81 | 50/37.95/9/3/0.05 | Tris | 2-4C | 66.96 | 0.05259 | 93.89 | Lipid Mix |
| 7-82 | 50/37.9/9/3/0.1 | Tris | 2-4C | 65.32 | 0.05412 | 93.28 | Lipid Mix |
| 7-83 | 50/37.7/9/3/0.3 | Tris | 2-4C | 64.83 | 0.07319 | 93.33 | Lipid Mix |
| 7-84 | 50/37.5/9/3/0.5 | Tris | 2-4C | 63 | 0.09219 | 93.21 | Lipid Mix |
| 7-85 | 50/37/9/3/1 | Tris | 2-4C | 62.7 | 0.1178 | 92.19 | Lipid Mix |
| 7-86 | 50/36/9/3/2 | Tris | 2-4C | 60.86 | 0.06607 | 91.41 | Lipid Mix |
| 7-87 | 55/38.2/4.7/2.1/0 | Tris | 2-4C | 106.6 | 0.008889 | 94.85 | Control |
| 7-88 | 55/38.15/4.7/2.1/0.05 | Tris | 2-4C | 120.6 | 0.01052 | 94.27 | Post Addition |
| 7-89 | 55/37.7/4.7/2.1/0.5 | Tris | 2-4C | 92.61 | 0.01561 | 95.7 | Post Addition |
| 7-90 | 55/38.19/4.7/2.1/0.01 | Tris | 2-4C | 98.35 | 0.01628 | 95.01 | Lipid Mix |
| 7-91 | 55/38.15/4.7/2.1/0.05 | Tris | 2-4C | 98.61 | 0.01343 | 94.91 | Lipid Mix |
| 7-92 | 55/37.95/4.7/2.1/0.25 | Tris | 2-4C | 95.98 | 0.01044 | 95.84 | Lipid Mix |
| 7-93 | 55/37.7/4.7/2.1/0.5 | Tris | 2-4C | 89.63 | 0.02471 | 96.15 | Lipid Mix |
| 7-94 | 55/37.2/4.7/2.1/1 | Tris | 2-4C | 84.69 | 0.02132 | 95.28 | Lipid Mix |
| 7-95 | 55/38.15/4.7/2.1/0.05 | Tris | 2-4C | 100.4 | 0.0228 | 94.27 | Lipid Mix |
| 7-96 | 55/38.15/4.7/2.1/0.05 | Tris | 2-4C | 100.6 | 0.007328 | 95.09 | Lipid Mix |
| 7-97 | 55/38.15/4.7/2.1/0.05 | Tris | 2-4C | 94.89 | 0.02021 | 94.41 | Lipid Mix |
| 7-98 | 55/38.15/4.7/2.1/0.05 | Tris | 2-4C | 94.82 | 0.01814 | 94.86 | Lipid Mix |
| 7-105 | 55/38.2/4.7/2.1/0 | Tris | 2-4C | 99.27 | 0.02149 | 91.7 | Control |
| 7-106 | 55/38.2/4.7/2.1/0 | Tris | 2-4C | 107.6 | 0.003511 | 93.20 | Control |
| 7-107 | 55/38.15/4.7/2.1/0.05 | Tris | 2-4C | 100.4 | 0.0343 | 93.59 | Lipid Mix |
| 7-108 | 55/37.7/4.7/2.1/0.5 | Tris | 2-4C | 93.59 | 0.04789 | 92.33 | Lipid Mix |
| 7-109 | 55/38.15/4.7/2.1/0.05 | Tris | 2-4C | 100.6 | 0.0288 | 92.48 | Lipid Mix |
| 7-110 | 55/38.15/4.7/2.1/0.05 | Tris | 2-4C | 98.78 | 0.03208 | 92.86 | Lipid Mix |
| 7-111 | 55/38.15/4.7/2.1/0.05 | Tris | 2-4C | 100.9 | 0.002 | 92.65 | Lipid Mix |
| 7-112 | 47.1/46.1/4.7/2.1/0 | PBS | 2-4C | 85.5 | 0.0313 | 96.3 | Control |
| 7-113 | 55/38.2/4.7/2.1/0 | PBS | 2-4C | 84.8 | 0.0263 | 96.7 | Control |
| 7-114 | 55/38.2/4.7/2.1/0 | PBS | 2-4C | 90.35 | 0.01 | 96.4 | Control |
| 7-115 | 55/38.2/4.7/2.1/0 | PBS | 2-4C | 87.21 | 0.0077 | 94.10 | Control |
| 7-116 | 55/38.6/4.7/1.6/0.1 | PBS | 2-4C | 107.5 | 0.297 | 94.00 | Lipid Mix |
| 7-117 | 55/38.2/4.7/2.1/0 | PBS | 2-4C | 89 | 0.01 | 93.74 | Control |
| 7-118 | 55/38.65/4.7/1.6/0.05 | PBS | 2-4C | 83.2 | 0.024 | 94.26 | Lipid Mix |
| 7-119 | 55/38.95/4.7/1.3/0.05 | PBS | 2-4C | 94.8 | 0.06 | 93.33 | Lipid Mix |
| 7-120 | 55/38.2/4.7/2.1/0 | PBS | 2-4C | 89.77 | 0.03029 | 93.32 | Control |
| 7-121 | 55/38.65/4.7/1.6/0.05 | PBS | 2-4C | 101.1 | 0.03086 | 92.21 | Lipid Mix |
| 7-122 | 55/38.2/4.7/2.1/0 | Tris | 2-4C | 104.7 | 0.01344 | 90.52 | Control |
| 7-123 | 55/37.3/4.7/3/0 | Tris | 2-4C | 90.9 | 0.03435 | 90.91 | Control |
| 7-124 | 52.4/34.6/10/3/0 | Tris | 2-4C | 87.66 | 0.01843 | 91.54 | Control |
| 7-125 | 55/38.15/4.7/2.1/0.05 | PBS | 2-4C | 82.07 | 0.02038 | 96.00 | Lipid Mix |
| 7-126 | 55/38.2/4.7/2.1/0 | Tris | 2-4C | 103.7 | 0.01282 | 90.98 | Control |
| 7-127 | 52.4/34.6/10/3/0 | Tris | 2-4C | 71.56 | 0.03463 | 93.43 | Control |
| 7-128 | 50/38/9/3/0 | Tris | 2-4C | 72.09 | 0.03283 | 92.57 | Control |
| 7-129 | 47/41/9/3/0 | Tris | 2-4C | 64.48 | 0.07433 | 93.88 | Control |
| 7-130 | 50/38/9/3/0 | Tris | 2-4C | 67.24 | 0.07985 | 90.26 | Control |

TABLE 13
Lipids and PEG-Lipids excipients used for LNP preparations

| Compound | |
|---|---|
| number | Structure |
| 502 | [chemical structure] |
| 507 | [chemical structure] |

### Methods

### Plating, Culturing, and Transfection of Primary Hepatocytes.

[0587] Primary human liver hepatocytes (PHH) and primary cynomolgus liver hepatocytes (PCH) from BioIVT were cultured per the manufacturer's protocol. Briefly, primary human hepatocytes and primary cyno hepatocytes were obtained as frozen aliquots from BioIVT. Two lots of primary human hepatocytes, each derived from a de-identified individual donor, were used for the experiments: STL was used for initial screening experiments; IRZ was used for potency dose-response and off-target experiments. For experiments with primary cyno hepatocytes, the UMP lot was used. Following the manufacturer's instructions, cells were thawed and rinsed with pre-warmed INVITROGRO HT medium prior to centrifugation at 4° C. for either 50 g for 5 min (for PCH) or at 100 g for 10 min (for PCH). The supernatant was discarded, the pelleted cells resuspended in plating medium, INVITROGRO CP, and plated onto either 24- or 48-well plates, which were either pre-coated or had been coated with bovine collagen overnight. For each 24-well plate, 1 vial of cells was used to achieve a density of approximately 350,000 cells/well; for each 48-well plate, 2 vials of cells were used to achieve a density of approximately 200,000 cells/well. Plated cells were allowed to settle and adhere for at least 4 h, but at times up to 24 hours, in a tissue culture incubator at 37° C. under 5% CO₂ atmosphere. After incubation, cells were checked for monolayer formation. The incubating media were then replaced with fresh hepatocyte maintenance media (complete INVITROGRO medium). The cells thus became ready for transfection. Cells were transfected either using a lipofectamine transfection agent or with LNP.

[0588] When using the lipofectamine reagent MessengerMax (ThermoFisher) for transfection of primary hepatocytes, gRNAs or gRDNAs were co-transfected with an equivalent amount of in vitro transcribed ABE8.8 mRNA (1:1 ratio by molecular weight) via, at doses ranging from 1,250-5,000 ng/mL of total RNA. Solution A: desired amount of guide RNA or guide RDNA was mixed with 1:1 wt ratio of mRNA in OptiMEM. Solution B: MessengerMAX in OptiMEM, incubated for 10 min at room temperature. After mixing solutions A and B, the mixture was incubated at room temperature for 5 min. In the initial screening experiments, this mix was then serially diluted 1:2 into OptiMEM for a dose titration. Regardless, 60 μL of the respective solution was added dropwise to each well of cells. The cells were then allowed to remain at 37° C. for 3 days. Cells were harvested and prepared for genomic DNA extraction using either a Thermo Kingfisher (for 48-well plate experiments), or Qiagen DNEasy blood and Tissue Kit (for 24-well plate experiments), per manufacturer's instructions, and quantified using a Qubit 3.0 Fluorometer.

[0589] Transfections were also performed with LNPs. The desired LNPs were mixed with plating media, containing 10% cynomolgous monkey serum prior to plating, at concentrations dependent on the desired top dose of test article, which was between 10,000 and 45,000 ng/TA/mL. When necessary, this mix was serially diluted 1:1.5 or 1:2 into media. LNP dilution mixes were incubated at 37° C. for 15 min and then added to plated cells, at doses ranging from 45,000 to 69 ng/TA/mL, after the previous media had been aspirated. The cells were then allowed to remain at 37° C. for 3 days. Cells were harvested and prepared for genomic DNA extraction using either a Thermo Kingfisher or Promega Maxwell RSC 48 (for 48-well plate experiments), or Qiagen DNEasy blood and Tissue Kit (for 6-well and 24-well plate experiments), per manufacturer's instructions, and quantified using a Qubit 3.0 Fluorometer. For OGM, genomic DNA was extracted following Bionano Genomic's protocol for high molecular weight (HMW) gDNA extraction. Pellets of 1.5×106 cells were resuspended in 40 μL DNA Stabilizing Buffer followed by Proteinase K digestion, RNaseA treatment and lysis in 220 μL Lysis and Binding Buffer (LBB). Genomic DNA was isolated and bound to Nanobind Disks, washed, and eluted by 65 μL Elution Buffer. Genomic DNA was then homogenized overnight and quantified using the Qubit Broad Range dsDNA Assay Kit.

### Targeted Amplicon Sequencing.

[0590] To assess for on-target and off-target editing, 10 ng of genomic DNA input was used for PCR amplification with Q5 HotStart polymerase (NEB) and primers specific to the target genomic sites-designed with Primer3 v.4.1.0 (https://primer3.ut.ee/)—with 5′ Nextera adaptor overhang sequences. The primer sequences were as follows:

TABLE 12
Primer Sequences

| | | Forward | Forward Primer | SEQ | Reverse | Reverse Primer | SEQ |
|---|---|---|---|---|---|---|---|
| | | Primer | Sequence | ID | Primer | Sequence | ID |
| Species | Target | Name | (5′ to 3′) | NO. | Name | (5′ to 3′) | NO. |
| Human | On- | GA0100_ | TCGTCGGCAGCGT | 711 | GA0100_ | GTCTCGTGGG | 714 |
| | target | OT_B1+ | CAGATGTGTATA | | OT_B1− | CTCGGAGATG | |
| | | | AGAGACAGAATG | | | TGTATAAGAG | |
| | | | TGGGAAGATACT | | | ACAGCGATTA | |
| | | | TTGAAGA | | | CTGGCAATGT | |
| | | | | | | CCCC | |
| Human | OT1 | GA0100_ | TCGTCGGCAGCGT | 712 | GA0100_ | GTCTCGTGGG | 715 |
| | | OT_B2+ | CAGATGTGTATA | | OT_B2− | CTCGGAGATG | |
| | | | AGAGACAGCCTG | | | TGTATAAGAG | |
| | | | GTCTCCTGTTCAC | | | ACAGAGAAAT | |
| | | | ACT | | | GGTTTGCTCA | |
| | | | | | | GAGGA | |
| Cyno- | On- | cAN_Ex6_ | TCGTCGGCAGCGT | 713 | cAN_Ex6_ | GTCTCGTGGG | 716 |
| mologus | target | 3_NEXT_ | CAGATGTGTATA | | 3_NEXT_ | CTCGGAGATG | |
| monkey | | F1 | AGAGACAGGGGA | | R1 | TGTATAAGAG | |
| | | | TTCGGATTTTTAA | | | ACAGCCCAAT | |
| | | | AAGTTGTC | | | GCAATCCCGG | |
| | | | | | | AAAA | |

[0591] After purification of the PCR amplicons with the ThermoFisher Sequalprep Normalization Plate Kit, a second round of PCR with Q5 HotStart polymerase was performed with Illumina primers containing unique dual indexes (UDIs), Nextera XT Index Kit V2 Set A and/or Nextera XT Index Kit V2 Set D, to generate barcoded libraries. Following a final purification with the Sequalprep Normalization Plate Kit, the individual amplicons were pooled and quantified using a Qubit 3.0 Fluorometer. After denaturation, dilution to 8 pM, and supplementation with 30% PhiX, the pooled libraries underwent 2×150-bp paired-end sequencing on an Illumina MiSeq System.

[0592] Targeted amplicon sequencing data were analyzed with CRISPResso2 v2.0.31 in batch mode (CRISPRessoBatch). For ABE experiments, the following parameters were set: “--default_min_aln_score 95--quantification_window_center-10--quantification_window_size 10--base_editor output --conversion_nuc_from A --conversion_nuc_to G --mn_frequency_alleles_around_cut to_plot 0.1--max_rows_alleles_around_cut to_plot 100”. For NHP experiments, an additional parameter was set to exclude low quality reads: “--min_single_bp_quality 30”. Moreover, in all cases, the parameter “--max_paired_end_reads_overlap” was set to 2R-F+0.25*F, following FLASH recommendations (http://ccb.jhu.edu/software/FLASH/), where R was the read length and F was the amplicon length.

[0593] For the on-target data from NHP samples, as well as for some of the cellular on-target data, editing was quantified from the “Quantification_window_nucleotide_percentage_table.txt” output table as the percentage of reads that supported any A-to-G/C/T substitution in the main edited position (position 6 of the protospacer DNA sequence). Indels were quantified from the “Alleles_frequency_table_around_sgRNA_*.txt” output table as the percentage of reads that supported insertions or deletions over a 5-bp window on either side of the nick site (at position −3 upstream of the PAM sequence), having excluded reads that supported deletions larger than 30 bp. The off-target site (OT1), as well as certain instances of assessing the on-target site, editing was quantified from the “Alleles_frequency_table_around_sgRNA_*.txt” output table as the percentage of reads from alleles with an A->G substitution in the editing window (positions 1-10 in the PAM distal side of the protospacer), having excluded reads from alleles with deletions larger than 30 bp. For each site, base editing was quantified by summing the percentage of reads supporting an A to G substitution in the editing window, requiring a minimum of 1000 reads.

### SureSelect Targeted Enrichment Sequencing.

[0594] SureSelect panels were designed and purchased from Agilent Technologies. Panels of SureSelect RNA probes for target enrichment were designed using the Agilent SureDesign module, using each candidate off-target site protospacer sequences nominated by ONE-seq (using GA441 and recombinant ABE8.8 protein), with an additional 150 nt genomic sequence flanking each side as the input. The RefSeq, Ensembl, CCDS, Gencode, VEGA, SNP, and CytoBand databases were used for the target parameters, with the least stringent masking and 3× tiling density applied in the design.

[0595] To perform SureSelect, 50-150 ng of genomic DNA, which contains approximately 60,000 copies of genome, was used for each experimental replicate. This ensures that over 1000 unique molecules were analyzed to support detection of rare substitution events. SureSelect assays were performed with the resulting RNA probes following Agilent's XT HS2 protocol. Briefly, gDNA samples were fragmented to 180 to 250 bp size range using a Covaris M220 focused ultrasonicator (75 W Peak Incident Power, 20% Duty Factor, 200 cycles/burst, for 150 seconds). Sheared gDNA samples were subjected to NGS library preparation steps: end-repair, dA-tailing, UMI adaptor ligation, whole genome amplification, probe hybridization and capturing, and post capturing amplification. The final library samples were sequenced externally by Broad Institute on an Illumina NovaSeq S4 with 2×150-bp paired-end sequencing. Two biological replicates for each condition, treated and control, were performed.

[0596] To analyze the SureSelect data, Adapters were trimmed using the “Trimmer” script in Agilent's AGeNT v2.0.5 tool. Reads were aligned to the GRCh38 reference human genome (ftp://ftp.ncbi.nlm.nih.gov/genomes/all/GCA/000/001/405/GCA_000001405.15_GRCh38/seqs_for_alignment_pipelines.ucsc_ids/GCA_000001405.15_GRCh38_no_alt_analysis_set.fna) using BWA MEM v 0.7.17-r1188 with parameter “—C”. Aligned reads were processed and duplicates were removed using the “LocatIt” script in Agilent's AGeNT v2.0.5 tool, with parameters “-i -R -IB -OB -U -L”. Nucleotide distributions at each position in the editing window (positions 1 to 10 in the PAM distal side of the protospacer) were determined using perbase v0.6.3 (https://github.com/sstadick/perbase), with parameters “base-depth -F 3848-Q 30”.

[0597] The first step of quantification of off-target editing was performed by computing allelic totals of reads containing A to G edits in the editing window of each site. This step was followed by statistical testing that tested the association of difference in allelic read counts to treatment condition (treated vs untreated label). For each site, base editing was quantified by summing the percentage of reads supporting an A-to-G substitution in the editing window, requiring a minimum of 1000 reads. Net editing (mean of treated edit % minus mean of untreated edit %) was computed as a measure of effect size of editing.

[0598] Editing across treated and control samples was then assessed for significance using P values derived from a logistic regression model that models the log odds ratio based on the proportion of edited reads, using the treatment vector treatmentᵢ (treated=1, control=0), as follows:

log πi1−πi=β0+β1*treatmenti log πi1−πi=β0+β1*treatmenti

[0599] The logistic regression model is fitted for each site and the significance calculation tests if the outcome (log odds) is associated with the treatment vector (i.e., the null hypothesis being β₁=0). Sites with P values of 0.05 or less and with editing levels in control samples less than 0.10% are shown as off-target sites.

### Lipid Nanoparticle Formulation and Analysis.

[0600] LNPs used were formulated as previously described (Conway, A. et al. 2019 Mol. Ther. 27, 866-877; Villiger, L. et al 2021 Nat. Biomed. Eng. 5, 179-189) and generated either by (1) microfluidic mixing using the Precision Nanosystems NanoAssemblr system according to the manufacturer's protocol, with some optimization for individual payloads or by (2) rapid inline mixing of a solution of lipid excipients in an organic solvent and an aqueous solution of gRNA and mRNA. The lipid solution generally comprises of a mixture of four formulation excipients namely: an amino lipid, a monomethoxypolyethylene glycol (or methoxypoluyethyle glycol) of average molecular weight 2000 Da conjugated to a lipid called PEG-Lipid, cholesterol and 1,2-distearoyl-sn-glycero-3-phosphocholine (DSPC), mixed in a predetermined molar ratio in ethanol. LNP composition comprised 40-65% of amino lipid, 2-20% DSPC, 1-5% PEG-Lipid, with the balance being cholesterol (all in mol %). The RNA aqueous solution contains a 1:1 by weight mixture of desired mRNA and guide RNA (gRNA) unless otherwise specified. For evaluating impact of mRNA to gRNA ratio, aqueous solution containing desired weight ratio of mRNA and gRNA were prepared prior to the preparation of corresponding LNPs, for evaluation; for example, the preparation of LNP test article to evaluate 6:1, 3:1, 2:1, 1:1, 1:2, 1:3 and 1:6 mRNA to gRNA ratio in mice. In some other instances, the mRNA and two gRNAs were mixed in 1:0.5:0.5 (mRNA:gRNA1:gRNA2) weight ratio to prepare LNPs containing desired mRNA and two gRNAs in a single test article. The aqueous solution of desired mRNA to gRNA was then mixed with the lipid excipients in ethanol by microfluidic or by rapid inline mixing. All LNPs for reported NHP studies were prepared by following the inline mixing protocols as described WO 2019/036028 A1, WO 2015/199952 A1, WO 2017/004143, WO 2020/081938 A1 and WO 2020/061426 A2. The PEG-Lipid used for the preparation of the NHP LNP test articles was selected from WO 2019/036028 A1, WO 2015/199952 A1. The LNP compositions and ionizable amino lipids were selected from the from Patent Publications WO/2017/004143A1, WO/2017/075531A1 and WO/2018/191719 A1.

[0601] As an example, the LNPs used for cellular and NHP studies had an average hydrodynamic diameter range of 55 to 70 nm, with a polydispersity index of <0.2 as determined by dynamic light scattering and 85-100% total RNA encapsulation as measured by the Quant-iT Ribogreen Assay. The LNP particle size (Z-Ave, hydrodynamic diameter), polydispersity index and total RNA encapsulation were measured as described in the literature prior to administration.

### Genomic DNA Extraction.

[0602] 100200 mg of monkey liver was loaded into 2 mL lysing matrix tubes (MP Bio). Livers were lysed with 0.5 ml PBS for the mouse liver or 0.25 mL PBS for the monkey liver, using the FastPrep-24 system (MP Bio) according to the manufacturer's protocol. Genomic DNA was isolated from approximately 20 μL of monkey liver lysate using a bead-based extraction kit, MagMAX-96 DNA Multi-Sample Kit (Thermo-Fisher Scientific) on the KingFisher Flex automated extraction instrument (Thermo-Fisher Scientific) according to the manufacturer's protocols. For monkey liver biopsy samples, Qiagen DNEasy Blood & Tissue kit extraction was used to extract genomic DNA according to the manufacturer's instructions. Extracted genomic DNA was stored at 4° C. until further use or at −80° C. for long term storage.

### ANGPTL3 Protein Levels Quantified by ELISA.

[0603] The plasma cynomolgus ANGPTL3 levels were determined by ELISA; briefly, test samples or standards of purified cynomolgus monkey ANGPTL3 diluted in calibrator diluent RD6Q (R&D, part #895128) were incubated with assay diluent RD1-76 (R&D, part #895812) in a 96-well microplate coated with a monoclonal antibody specific for human ANGPTL3 (R&D, part #893734). After four washes with wash buffer (R&D, part #895003), human ANGPTL3 conjugate (R&D, part #893735) which contains a polyclonal antibody specific for human ANGPTL3 conjugated to horseradish peroxidase (HRP) were next incubated in individual wells. After four washes, TMB substrate solution (R&D, part #895000 and 895001) was used to develop the plate. Optical density was determined using on a microplate reader set to 450 nm. Readings at 540 nm were subtracted from the readings at 450 nm to correct for optical imperfections in the plate.

### Quantifying Lipid Levels.

[0604] Reagent kits each analyte contain reagent, cholesterol, triglycerides and HDL-C are quantified using absorbance measurements of specific enzymatic reaction products. LDL-C is determined indirectly. Most of the circulating cholesterol is found in three major lipoprotein fractions: very low-density lipoproteins (VLDL), LDL and HDL. [Total C]=[VLDL-C]+[LDL-C]+[HDL-C]. Thus the LDL-C can be calculated from measured values of total cholesterol, triglycerides and HDL-C according to the relationship: [LDL-C]=[total C]−[HDL-C]−[TG]/5, where [TG]/5 is an estimate of VLDL-cholesterol expressed.

### Direct Measurement of Triglyceride Levels.

[0605] A clinical analyzer instrument was used to measure a ‘lipid panel’ in serum samples. This entails the direct measurement of cholesterol (total C), triglycerides (TG) and high-density lipoprotein cholesterol (HDL-C). A reagent kit specific for triglycerides contains buffers, calibrators, blanks and controls. Using the provided reagents, serum samples from the study were analyzed. Triglycerides were measured using a series of coupled enzymatic reactions. H₂O₂ was the end product of the last one and its absorbance at 500 nm is used to quantify the analyte. The color intensity was proportional to triglyceride concentrations. All values were reported in mg/dL.

### LNP Treatment of NHPs.

[0606] The NHP studies were approved by the Institutional Animal Care and Use Committees of Envol Biomedical and Altasciences, respectively. NHPs studies were performed at Envol Biomedical (study #VTP2001) and Altasciences (study #1388.02, 04, 05, 09, and 11), with both studies using Macaca fascicularis) of Cambodian origin. The animals were 2-3 years of age and 2-3 kilograms in weight at the time of study initiation. All the animals were genotyped at the PCSK9 and/or ANGPTL3 editing site(s) to ensure that any animals receiving LNPs were homozygous for the protospacer DNA sequences perfectly matching the gRNA sequence, and animals were randomly assigned to various experimental groups. The animals were premedicated with 1 mg/kg dexamethasone, 0.5 mg/kg famotidine, and 5 mg/kg diphenhydramine prior to LNP administration unless otherwise stated. The LNP were administered using a temporary catheter inserted into a peripheral vein connected to a primed infusion line, over the course of 1 hour (+/−5 minutes). Dose formulations were administered at a volume of 6 ml/kg, unless otherwise specified, and dosed at mg/kg corresponding to mg of total RNA per animal weight (kilogram). The dose was calculated based on total RNA that constitute the amount of mRNA and gRNA, after formulating the LNP. The appropriate volume based on the weight of the animal was delivered using an infusion pump. Control animals received phosphate-buffered saline instead of LNP under the same infusion conditions. When there were two LNPs constituted from amino lipid 1 and amino lipid 2 used in the same NHP study, the test articles were identified as LNP #1 and LNP #2 where mRNA and gRNA used for preparing these LNPs were the same. If there was only one LNP composition used in a study, the test article was identified as LNP.

[0607] For blood chemistry samples, animals were fasted for at least 4 hours before collection via peripheral venipuncture. NHP studies generally followed collection on the following schedule: day −10, day −7, day −5, day 1 (6 hours after LNP infusion), day 2, day 3, day 5, day 8, and day 15. In the long-term study, samples were also collected at day 21 and day 28 and have generally been collected every 2 weeks thereafter and analyzed by the study site for LDL cholesterol, HDL cholesterol, total cholesterol, triglycerides, AST, and ALT. For each analyte, the mean of the values at day −10, day −7, and day −5 were regarded as the baseline value. A portion of each blood sample was sent to the investigators for ANGPTL3 protein measurement.

### Optical Genome Mapping.

[0608] A total of 750 ng high molecular weight (HMW) genomic DNA per sample was used for labeling according to Bionano Prep Direct Label and Stain DLS Protocol. Genomic DNA was labeled at a specific motif (CTTAAG) throughout the genome with DL-Green fluorophores by DLE-1 enzyme. After proteinase K digestion to inactivate the DLE-1 enzyme, samples were cleaned up through successive membrane adsorptions. Genomic DNA backbone was counterstained for size identification, incubated and homogenized overnight. The genomic DNA concentration of labeled samples was measured using the Qubit High Sensitivity dsDNA Assay Kit per manufacturer's instructions. The labeled samples with concentration of 4 to 12 ng/μL were loaded onto Saphyr chips and run on a Saphyr instrument to collect images of fluorescence-labeled genomic DNA molecules.

[0609] To identify treatment-specific structural variants (SVs), the Dual Analysis mode of the Structural Variant Annotation pipeline, following best practice recommendations from Bionano, was used for evaluating all SV calls from an untreated control and treated samples.

[0610] While preferred embodiments of the present invention have been shown and described herein, it will be obvious to those skilled in the art that such embodiments are provided by way of example only. Numerous variations, changes, and substitutions will now occur to those skilled in the art without departing from the invention. It should be understood that various alternatives to the embodiments of the invention described herein may be employed in practicing the invention. It is intended that the following claims define the scope of the invention and that methods and structures within the scope of these claims and their equivalents be covered thereby.

1.-219. (canceled)

220. A hybrid guide nucleic acid, wherein the hybrid guide nucleic acid comprises (i) a spacer sequence comprising a deoxyribonucleotide and a ribonucleotide comprising a ribose, wherein a 2′ hydroxyl group of the ribose is covalently linked to a methyl group (2′-OMe), and (ii) a binding scaffold.

221. The hybrid guide nucleic acid of claim 220, wherein the spacer sequence comprises an unmodified ribonucleotide.

222. The hybrid guide nucleic acid of claim 220, wherein the deoxyribonucleotide is located on position 3, 4, 6, 7 or 8 from the 5′ end of the spacer sequence.

223. The hybrid guide nucleic acid of claim 220, wherein the spacer sequence comprises deoxyribonucleotides on positions
3, 4, 6 and 7,
3 and 4,
6 and 7, or
3, 4, 6, 7 and 8,
from the 5′ end of the spacer sequence.

224. The hybrid guide nucleic acid of claim 220, wherein the spacer sequence comprises one to ten deoxyribonucleotides.

225. The hybrid guide nucleic acid of claim 220, wherein the spacer sequence comprises a phosphorothioate backbone modification (PS).

226. The hybrid guide nucleic acid of claim 220, wherein the spacer sequence comprises a (2′-OMe)PS(2′-OMe)PS(DNA)PS(DNA)(RNA)(DNA)(DNA) motif, optionally wherein the (2′-OMe)PS(2′-OMe)PS(DNA)PS(DNA)(RNA)(DNA)(DNA) motif is located at the 5′ end of the spacer sequence.

227. The hybrid guide nucleic acid of claim 2206, wherein the spacer sequence comprises a sequence with at least about 80%, about 90%, about 95%, about 99%, about 99.5%, or about 100% sequence identity or sequence similarity to SEQ ID NO: 28 or 29.

228. The hybrid guide nucleic acid of claim 220, wherein the spacer sequence comprises a (2′-OMe)PS(2′-OMe)PS(DNA)PS(DNA)(RNA)(DNA)(DNA)(DNA) motif, optionally wherein the (2′-OMe)PS(2′-OMe)PS(DNA)PS(DNA)(RNA)(DNA)(DNA)(DNA) motif is located at the 5′ end of the spacer sequence.

229. The hybrid guide nucleic acid of claim 220, wherein the spacer sequence comprises a sequence with at least about 80%, about 90%, about 95%, about 99%, about 99.5%, or about 100% sequence identity or sequence similarity to SEQ ID NO: 30 or 31.

230. The hybrid guide nucleic acid of claim 220, wherein the spacer sequence comprises a (2′-OMe)PS(2′-OMe)PS(DNA)PS(DNA)(DNA)(DNA)(DNA) motif, optionally wherein the (2′-OMe)PS(2′-OMe)PS(DNA)PS(DNA)(DNA)(DNA)(DNA) motif is located at the 5′ end of the spacer sequence.

231. The hybrid guide nucleic acid of claim 220, wherein the spacer sequence comprises a sequence with at least about 80%, about 90%, about 95%, about 99%, about 99.5%, or about 100% sequence identity or sequence similarity to SEQ ID NO: 11 or 12.

232. The hybrid guide nucleic acid of claim 220, wherein the spacer sequence corresponds to a protospacer on a target gene, and wherein the target gene is ANGPTL3.

233. The hybrid guide nucleic acid of claim 220, wherein the hybrid guide nucleic acid comprises a sequence with at least about 80%, about 90%, about 95%, about 99%, about 99.5%, or about 100% sequence identity or sequence similarity to a sequence selected from the group consisting of SEQ ID NOs: 79-82 and 106-113.

234. An in vivo hybrid guide gene editing system comprising:
(a) the hybrid guide nucleic acid of claim 220, and
(b) a gene editor protein or a component thereof comprising a nucleic acid binding domain, or a nucleic acid encoding the gene editor protein or the component thereof.

235. The in vivo hybrid guide gene editing system of claim 234, wherein the gene editor protein or the component thereof further comprises a deaminase.

236. The in vivo hybrid guide gene editing system of claim 234, wherein the nucleic acid binding domain is capable of binding to DNA or RNA.

237. The in vivo hybrid guide gene editing system of claim 234, wherein the nucleic acid binding domain comprises a CRISPR protein or a fragment thereof, a catalytically impaired nuclease, or a prime editing protein or a fragment thereof.

238. The in vivo hybrid guide gene editing system of claim 234, wherein the gene editor protein or the component thereof comprises a single fusion protein or two or more proteins.

239. The in vivo hybrid guide gene editing system of claim 234, wherein the nucleic acid encoding the gene editor protein or the component thereof is an mRNA.

240. The in vivo hybrid guide gene editing system of claim 234, wherein the gene editor protein or the component thereof affects less than about 10%, about 9%, about 8%, about 7%, about 6%, about 5%, about 4%, about 3%, about 2%, or about 1% editing on all off-target sites as compared to a gene editing system comprising a corresponding guide nucleic acid without the deoxyribonucleotide.

241. The in vivo hybrid guide gene editing system of claim 234, wherein the gene editor protein or the component thereof affects over about 50%, about 60%, about 70%, about 80%, about 90%, or about 95% editing on the target gene as compared to a gene editing system comprising a corresponding guide nucleic acid without the deoxyribonucleotide.

242. A pharmaceutical composition comprising the hybrid guide nucleic acid of claim 220 or the in vivo hybrid guide gene editing system of claim 234.

243. A method for treating or preventing an atherosclerotic cardiovascular disease in a subject in need thereof, the method comprising administering to the subject a therapeutically effective amount of the hybrid guide nucleic acid of claim 220, the in vivo hybrid guide gene editing system of claim 234, or the pharmaceutical composition of claim 242.

The application's sequence listing, which the Patent Office published only in electronic form, follows.

SEQUENCE LISTING (804 sequences)

SEQ ID NO: 1 - DNA, 14994 bp, Homo sapiens
  source 1..14994: mol_type = other DNA
aatgacaaactgaaaaaatctattgtttgttatatatataacaaagaattagtatccacaatatgtaaataattcctaaaattagtcagaaagagacaaacttaaaaagagggtaacaaggaggggagcaaattatgtacataaccagatgattcgcaaagacggcaacagagatggccagcaaaacaaactagatatatacttgtctattagatttatcaacattttttgcctttttcattaaaagcatttgtaaaaggatataggaaaagaggaactctcatatactcctggcagggatgtaaattggtacaacccttttgaaggacaatctgacaaaagcaatcgtaagttacaagtcaacatctatgaatgtatatgaaaatatttatatacatacatcaccaccataaaagcattttctatacatactgtttataattagaaaattggaaacaaatgattaaaagggggctgattaaattaaggttcatctatataacaggattatgcagctattaaaaaggacgtggtaactctatagacattcataggaaaataaattttaaaatactaagatcctgaatgatatatatatcatgagctattatacataacaagatcccacttgtgttataaaaaattatgtttagtcattcaaagggtctggtatgatagacccaaaatgttaatagagtcgagatttttattttttataggtttttgaaatacctgaattttcacaataagtactttgcacattaaaaatcttagctgggcatggtggctcacgcttgtaatcccagcactctgggaggccaaggtaggcagatcacctgaggtcaggagttcgagaccagtctggccaacatggtgaaaccccgtctctactaaaaatacaaaaattagccaggcttggttgggggtgcctgtaattccagatactcgggaagctgagacaggagaatcgcttgaacccaggagggggaagttgcagtgagctgagatcacgacgctgcactccagcctgggcaacaaagagcaaaactccgtctcaaaaataaataaagaaaaaatctttacatgtccaaagatacggctgttcaactaaaaaatatatatgtataaaacttaacatgttaatagtgaacacacaaaacagtaagatagataaaattattccttcaaagctcacttaacctctggatctacactgtccaaaaagacggtctaatgagacaattgagcacttgataggtgagtggttctaactgagatatgttctcagtataaaacatacaataggatcttcctatacaacattaattaaaaaacaaactattgtagttaaaaaggaaaaaattagagatactatgtaaaaaagagccaaaataccttgtattttatttgaaagacatatctccataagattacacaacctcgtgtaggataaaggactttgctttgcttggaatttaaacaatttaggctcttaaatgtcctaaaattctctgtagctaagaaatttttatattggttcctaggaactaggaatccttaaattaggccctacatttgcttacaagtttattttccttggcataaaattttttagtttttacattactggttatatttgatcagggttctatttaaataggcacaagttcaagcaaagatcagattctgcttttagcagtgtgtactcagacaggaagtattaaaaggcaggcagaaaatcctttataaaattactactttcaatgcattttcccacgttgaaatgcttctgcagtttataattaggcaaattactttaattataatcaataatgctgttcaaattactataagaattatacagatatttataccaagagacaatatactagaaaccaagactacgtgaccattacctctactctgtcagtgttatttgtgagaaattgcacaaattttgcaaaaagtgttagtatcctactacagtaggatataatatagaaggaaataatttcataaagcctgtctttggtactagtgctcagttactttcattaactaaaaaaggggctactcttcaaattcccttctctaaaaagaatgtactatatcaaaagggggtaaacactactacgtatacattctgcacttagaaatccctatatgttgattttatcattctcttattcaataaatattgtttctacaatgtgtaaggcattactgtactaaagcattataaggaatataagttaaaaacacatacaaatcttgccaatcaacagcttatagtgtaataggggagagaagctggcccatctatattctccctcaactagcaagtggatgaaatatcagggtcaatagttataagccacaaaagctgacagcttaattaagagaagttttgaaatatgtatttcatgaccaataattacaactgtaacttttctatttaaagaaggagaaaatttgaatttcttctctagctcaacatacacttctataattccattacatgaaccagagtaaagggtaagatggaaatgaagaatattttcttacccttttgtggttctatattggacacttaaaaatcatacacaacctaatcaaaagatgtaattctttaaaaaggtacgagaccaaaattcagaaaatctagactataacaaaatttctcaatttacattatcttaatatgcaattaattttcaccagtaaaatactatagtatgggtacaaatgcattgattagttctaattacaaaaatggctaatatataatactgtgtagtgtttatgatacatcagataatgttctaagtgctctgaaaatataaacttttaatcttttatacgaccctataaaataggtgttattctcactggagagatgagaaaacaggggttcagagatgtgaagtaatttgaccaaaggtcacaaagctgaagaatatgaaatccgggattctgattcaggcagtcttattccagaatcatgctcttaaccactatggaatactgcctctactgtaactattatacccaaaacccttaatcctaagtcatcaaaaggaagagcctctattttacacaatgaagaggcatttctaagaatagaaatttagggacgagcacagtggcttactcctttaatatcagcactttgagaggctgatatgggaggttcacttgaagtcaggagttcaaggtcagcttgggcaacatagtgaaacacagtctctacaaaatatttaaaaattagctgggtgtggtggcatgcatctatagtctcagctacttgggagacagagggaggaggcttgctcgagcccaggagttcgtggctatagtgagctatgatcatgccactgcactccagcctggacaacagagcaagaccctgtctctaaaaaagaaaagaaatttggaaatggtttattttgtattaacaatttataatttacactgaaatttattatgataaaacttttccctgtgttaaaaagctattaactttatgaaaaatttcttttaggtaaggttgattatatatacccacacacatacacaggttaaaagttagtttcatgtgacataataactagcattttgagcactacctgtttgcccagcactgttctaagtgctctacatgtattattgttaaattatcataacactatgaattatgtactataattaccccagctttacagatgaggagactaatccatggggaggttaagtaacttgtccaaggccagacagctagagccggcttttggacccacaccacagtctgactccagcacccatattcttaacaatttcaccatattaatatgtcaagattaagcagttttaaaggatgctattttctcacaaatttcttaatatgaacactcaataagaataatcactaatataagcatttagtatttttttaacactaagttggaagcatagtggaacatttatttttagaaatattattaattggctgggctcacgcttgtaatcggctgggctcatgcctgtaaattttgggaggccaaggtaaaagaattgcttgagcccagtatttccagaccagcatgggcaatacattaagacatcatctttaaaaaaaaaatgttattaatctcctctttttgttaaatgtatattatcaaaattgttactaagctaacaaacttcagaaaaacttatgatgggcaagctgcttgtgacattgaaggtatttaagattcaattctagtttggtcctagatgaccacatatccattgttccttcaacgagcacatggtaaagagcctagaacacagagacacagaacacagtggagaaaagggagtgaaatgtctttaatgacacttactatatatgggattttgtgacaatatacaaggatggttaagacatataaggtgatgcaaaaaaacatattaacaattatagtgacaaaaaatgaggagcatataattatacattgatttatacagagtaccagaggaacacagcattgagagccgtaacaccacctgagggagtggagaaaggcttcagagagaaagtgttttttggaatggatcactgtttccaaaagaactaaagtacagtttgagaaatgcatacttaattcattacttttttcccctcaactttaataataaatttacccaacaaaaaagtttatttttgacttgtaaatctcttaaaatcataaaaaagtaaaattagcttttaaaaacaggtagtcaccatagcattgaatgtgtagtttataatacagcaaagttaaatacaatttcaaattacctattaagttagttgctcatttctttgatttcatttagcattgatctaactcaatgtggaagaaggttacattcgtgcaagttaacacggcttaatgattaactatgttcacctaccaaccttaccttttctgggcaaatattggtatatatagagttaagaagtctaggtctgcttccagaagaaaacagttccacgttgcttgaaattgaaaatcaagataaaaatgttcacaattaagctccttctttttattgttcctctagttatttcctccagaattgatcaagacaattcatcatttgattctctatctccagagccaaaatcaagatttgctatgttagacgatgtaaaaattttagccaatggcctccttcagttgggacatggtcttaaagactttgtccataagacgaagggccaaattaatgacatatttcaaaaactcaacatatttgatcagtctttttatgatctatcgctgcaaaccagtgaaatcaaagaagaagaaaaggaactgagaagaactacatataaactacaagtcaaaaatgaagaggtaaagaatatgtcacttgaactcaactcaaaacttgaaagcctcctagaagaaaaaattctacttcaacaaaaagtgaaatatttagaagagcaactaactaacttaattcaaaatcaacctgaaactccagaacacccagaagtaacttcacttaaagtaagtagaaaataaagagggttcatgtttatgttttcaatgtggatcttttaaaaaaaatatttctaaggcatgccatttgaaatactttgttgcattgttgaaatacttttttttccaagaaaaataatctccagaaaataaaatttcctattataatttcaagttagttttttgtttccctaatgttatatatgaaaacactgaaaatttgcattttatatgaaaattacaaatcggttaaattatacaatctagaacactatgtcattacactattgtaaattactgaaggtaagtaaaaagttaaaaaaaatttaaaactattctccagtgtttaaaacagattaaataatacagtaaatggaaaagatttattcatatgaaaatatgctgggctttttcttttaattgaagttcagaaaatcaaattttagagatagtacaatttaaataaaatgttaaggacaaaaatatgtgctatttgaaagaagcatacaaggggaaggaattgccaatattcatttttcaaatccattattagtttaaaaatttagattatgatagtgttacaggaaattaatagaaaagaaagaggaaagcaacttataaccaacctactctctatatccagacttttgtagaaaaacaagataatagcatcaaagaccttctccagaccgtggaagaccaatataaacaattaaaccaacagcatagtcaaataaaagaaatagaaaatcaggtaagtcagtattttaatggtatgtcccatctttcacacaggtctgtaaaaacactgaatcctaaaattatttacaagctttaactggatcatgagtaaaattatcacatcagcataactgttaaaattgcaggctctgaagctaataaactacctgcatttaaaccatggctctaaaactttgtgtgaccttgaataaattacttcacccctttatctctcagtttcctcacatatactacaaagataataacagaacttataggattattgtaagaaaaaaaattaattcatagcagccaatgtcatcttactaaaattcaaattagatcatgtttctctttgctcaaaaccacacaatagctttccatttcactcatattggctctttagaccaagattacccaacccttcgtcatctcactgacttcacctcctctactctagttattctgaccgctttaccagtattcaaacacatcaaacatactgccacctcaaagcctttgcccttgttgtttcctctaactggaacgctcttctgccctggtatctacgtggcccactctctgatttcccttagggtcgttatcaaacaaaaaattcccaatgaagacttacaaggtcacttaaccaaaaatcacaaccgcctggtcccatccctgaaaacttctacttccttagctacttttctcctgcacactcacctttatttaacataacataaattttagttatttatctcttctattcctgcactaaaatgtaagctctgtgaatacagggattttttccattatcttcatattttccattatttgtatatactccagaatatagaatactgtatggcacacagtaggcatttctgttgaattaataaatgtaatgtcatattcacacagaagcgtgtgctatgattattattacttggattactagaaatagtgtgcctcataattaaaggtcaacattcaacaatgtaattaatctacaatgtaaacatctggtgaagtgacagagggaagcacttgtttagaaaaaagctatgtcagaatccatgtattctaatatgcagtacaatagtttaaaaatattaataatactctcaaacagctattcaagaggattcaaaaaacataatataaactcagagaaactggtaaacaaaatcattttcaagagatataaaacaaatattattaccaatttccactaaacaaacataatgttagtagtgctgctaaaaggttttttatcaactacttttggtttccatactttccttcttatgatgttattattctaaattcttttcaattatatcttttactatgattaaatgaacctgctccccaaagcaaaatgttactatagtaatatacattgtgtctaaaaataaaaatgtgtgaagaaaccaaaacaatgaatttctgagttggaagaagagttagatcatttaactttctcatatttaaattaaaaaaacaaaactctaaaaatttaagtaactttaagatcacatagttacttagtagaaaagagtaatacccagcaagcaaactttacaatagatccttttaaataaggtcctaggaaatatcattcatgccagcatcaaaaaactaacactaataatgcaagatattatatattctgcttttcttactgtcaatgagaaaaactatcattcaataaattgcaaacccaacacacttaaataaaaataaaatgttactgctaaactaacgataaactactgaatatatagaaagtaagcaaacaaacttgccaacctgccaacatctacagatatgtttacaggtcaaaaattatcaaattatcaagaaagcctggttcaaattatgtattatgtctttatcacaggtctgaagatcagtaagacctaaaactgaaaattattaaacttaaaatctgaacagaatatcaaatatattttattcatataaataaaagaatacattacaatattctaagcaaagcagtctctacttttggccttgctctgttttccgaccaatgtctgcttttttgccttgctttatttttttatcttattaaataatgtccctgattaaatattttgagaacaggtaatctgtacaatctgaataacactgtttatctaaatatcaaacaccgttataacattatgaactgaaagacaaactgtacttctgacatccttactcagatttcccctaattgtatattcagtatcattttaaaaaacagatttatattcttttatcagctcagaaggactagtattcaagaacccacagaaatttctctatcttccaagccaagagcaccaagaactactccctttcttcagttgaatgaaataagaaatgtaaaacatgatggtaagacactttggtgggtttccttcttgaagctattattatcaaattccctattcttaggacttgttctagactaaaagatagttaagagatatccatcaaatacaatgtatcaacctaaactggatgctggggttctttttacaccctataaaagacatacctaagacaatcagagaaatacaaatatggacttgattattagataatatagaaggtttattaattttcttagatgtgatcatggtattgcagttttaaaggagaacaatctcctgtttaagagatacatgctgaaatatttacggagttaaaggtcactggactccagactggtgatagaacaagactctgtctctaaaaaataattaattttttaaaagaaaatagtttggtaagatgattcttacattcttaaataacacgccatctaagaaaaatgctttaacataaacattactgaaaaaatgctacatttgccacaacttcataaaatgtcaagtgaaatctcaagctccaaagatattattcctattactaaatctgatgtaataacattttattgattctaggcattcctgctgaatgtaccaccatttataacagaggtgaacatacaagtggcatgtatgccatcagacccagcaactctcaagtttttcatgtctactgtgatgttatatcaggtaaaacctgtctaaggagaatagacagtagttagttcaacttactcattacgtattaggaagattaacctggttatcattgttttatacatatatatatgaaatatatatgagtattcgtataaatataatacttttaccttgtttatgtatttactcaatattctccttttcctctaaaataatctgaagtgactattatcaataagtttactatgccaaaattcattaattgcctttcacttaacttttgggaccataataaataataaaatgtattgccataacattaataaactaccttacaaaaccaccaattaaaatcaaacaaacaaaaaagtgttatttacatctgtcaacataaatctactaaaaatacatgatttcattcattatattcaggtagtccatggacattaattcaacatcgaatagatggatcacaaaacttcaatgaaacgtgggagaactacaaatatggttttgggaggcttgatggtaaggggactacattcaatcattcattcacttgctaatctacaaatatttactgagaacctcttatggaccaggtattaggaaaagtagtaacgaacgagaagcagtctcagccttcatataatttattatcaaacaattacacatttgttagtaaattacacttattacaactgttattatttgaattatatttatcacaattacatgtctgttcttaaatatacttatcacaatttaattccacggcttacaatgatcataactataattattaaagacaattttgattaaatgttatgtcataagtagtaactgttacaaataagctgtgaaaagaaccactcctagcattagtcactctattctctcattaacgttttacatatcaattaattggaagttaaaaggaccaggaaactcagacatacagtatacattttaaaatttcaattatttaaatataatatatagaatgtatggcttataatgaattagttaactcaatgcaaattattctattttgattacaaatagtaaaataagcaagataaaataacagatgtttaaaatccaaaaagcacatacaaaaatccatgaatgatgtctaagtactcacttataaagtagaagacattcattattatatcaaatttttaaatgctcagtactatttgaccatttaaaaattttgtattcaaactaccagtgaaagccctacctagaaggtatactcagtgataagttttgtagctccaaatcttctaatagtgagtgtaaccccaaaataaaaggctgacaggtaagtcgagaatactcacttaattctggtaagaaagcaacccatttgtacttgtatttaccagcaatccttaaaatgaagcttcctactaactcaatagcaataagacaatagtgaatgtttaatgaaaacagtattttataaatactttaataaaaaggattgtgatgaagaacaatctatttatatttgttatttgtttttaattccaataaaaataatttttaaaattacagaaaaaagttattaagaaccatgcttttaaatttaaaatgattttttaaatttattcctgtctttttctacaaagaaagcatacattaagcaaataccaaaggccaggtttacatttgaagaaagtgacattattattactcaagtctctaggaatacttaacacatctcttgactgtatatggatgttaataaatagctgacagtaaagtttatccatataaagacttgcaaatattcctctaccaatgacgagactttaaaatatctataataatgtaacacatttcactggtgaaacatgtcttgtcatatgcattatagaaaggataatcagactttcagttatattaatatttttaacatttttgtgcacatagctatcttcaataaaattgttttaaaaggtattattttaagatacactaaaatgatcaagggattcaagactaaacaactcaattagttgcaccaataaaaaacacttaaaaaaactgtcagtgtccaacctgtacttaataactcacagatttttaaaacttttcttttcaggagaattttggttgggcctagagaagatatactccatagtgaagcaatctaattatgttttacgaattgagttggaagactggaaagacaacaaacattatattgaatattctttttacttgggaaatcacgaaaccaactatacgctacatctagttgcgattactggcaatgtccccaatgcaatcccggaaaacaaagatttggtgttttctacttgggatcacaaagcaaaaggacacttcaactgtccagagggttattcaggtatctttttctgataccaatactttattttcatatcttcaaagtatcttcccacattattagctattatctgcaatgacaacttttaaaaatccgaatcccaaataagcgttttctctctagacgaaaacctcttaactataatgaaagtgttcattctagttcaatcaggtattttacctctaatcttcctcagattttctattttttggtagtgtatagattatttatacagattatttaaaattgggacttatacagattatttaaaactgggatacatgcatctaaaacactgtaatatttataagaaaggaagataaacttacggggaaatacagtaacagtaactacatacgagtctgtacccattaaattgcatatctatctcctttaggaggctggtggtggcatgatgagtgtggagaaaacaacctaaatggtaaatataacaaaccaagagcaaaatctaagccagagaggagaagaggattatcttggaagtctcaaaatggaaggttatactctataaaatcaaccaaaatgttgatccatccaacagattcagaaagctttgaatgaactgaggcaaatttaaaaggcaataatttaaacattaacctcattccaagttaatgtggtctaataatctggtattaaatccttaagagaaagcttgagaaatagattttttttatcttaaagtcactgtctatttaagattaaacatacaatcacataaccttaaagaataccgtttacatttctcaatcaaaattcttataatactatttgttttaaattttgtgatgtgggaatcaattttagatggtcacaatctagattataatcaataggtgaacttattaaataacttttctaaataaaaaatttagagacttttattttaaaaggcatcatatgagctaatatcacaactttcccagtttaaaaaactagtactcttgttaaaactctaaacttgactaaatacagaggactggtaattgtacagttcttaaatgttgtagtattaatttcaaaactaaaaatcgtcagcacagagtatgtgtaaaaatctgtaatacaaatttttaaactgatgcttcattttgctacaaaataatttggagtaaatgtttgatatgatttatttatgaaacctaatgaagcagaattaaatactgtattaaaataagttcgctgtctttaaacaaatggagatgactactaagtcacattgactttaacatgaggtatcactataccttatttgttaaaatatatactgtatacattttatatattttaacacttaatactatgaaaacaaataattgtaaaggaatcttgtcagattacagtaagaatgaacatatttgtggcatcgagttaaagtttatatttcccctaaatatgctgtgattctaatacattcgtgtaggttttcaagtagaaataaacctcgtaacaagttactgaacgtttaaacagcctgacaagcatgtatatatgtttaaaattcaataaacaaagacccagtccctaaattatagaaatttaaattattcttgcatgtttatcgacatcacaacagatccctaaatccctaaatccctaaagattagatacaaattttttaccacagtatcacttgtcagaatttatttttaaatatgattttttaaaactgccagtaagaaattttaaattaaacccatttgttaaaggatatagtgcccaagttatatggtgacctacctttgtcaatacttagcattatgtatttcaaattatccaatatacatgtcatatatatttttatatgtcacatatataaaagatatgtatgatctatgtgaatcctaagtaaatattttgttccagaaaagtacaaaataataaaggtaaaaataatctataattttcaggaccacagactaagctgtcgaaattaacgctgatttttttagggccagaataccaaaatggctcctctcttcccccaaaattggacaatttcaaatgcaaaataattcattatttaatatatgagttgcttcctctatttggtttccttaaaaaaaaaaaaaactctcataggacatgtttcattttgttcctttcaggagtagtaaattagacgttttccccatataaagcttttttctaccagaaagatacttctggtagaagaagagaaaggagctctttatggttcacacgactgtctcctgtcctaactactttgcttaaagtgctcaaattccatcactactcacagttgtctaatctaagtctaatcccctttgatctctcagactaccttcccttttatctctctactacttaataataagaatatctttttttcaaacttgaccttcattttgctttcacaatactatactctccatggattatcccttatctgaatccatctttataaccctattcctttctcatatttagtactgtgggccaatggacaaccttcaatcatcttttctacactgaccctcagacattctatctgctctcacggactcctttatttaccatgaataaagttccaaaatctacatattcatcccaagtctctttccagttccccttcttacattgcctatttgccatttctcccttcaataccctatacttcactcaaattcaacataccaaaaataaaaggccaggcacggtggctcacacctgtaatcccaggactttgggaggctgaggcaggtggatcacctgaggtcaggagtctgaccagcctgaccaatatggtgaaaccccgtctctacctaaaatacaaaaattagccaggcgtggtggcatgtgcctacagtcccagctactcaagaggctgagacaggagaatcgcttgaacccaggaggcggaggttgcagtgagctgagatcacaccaatgcactgggtgacagaacaagactgactcaaaaaaaaataaataacaaattccccagccccttactgctactgctatccctttctacccacctttccctcctttatactctttcacaccatcttcctcacttctttatatccattaatatgaccagcatgttcccagtcacagaagcctggaacccggaagacatctctggcttttcactcaactttgtaaactacctcttttgtatcataagccaccaagttcaatacaatcttctcttgaaacgtctcttaatcttataagctttcttccccaaagactgtctttaacttcagtgctagattatataagt

SEQ ID NO: 2 - protein, 460 aa, Homo sapiens
MFTIKLLLFIVPLVISSRIDQDNSSFDSLSPEPKSRFAMLDDVKILANGLLQLGHGLKDFVHKTKGQINDIFQKLNIFDQSFYDLSLQTSEIKEEEKELRRTTYKLQVKNEEVKNMSLELNSKLESLLEEKILLQQKVKYLEEQLTNLIQNQPETPEHPEVTSLKTFVEKQDNSIKDLLQTVEDQYKQLNQQHSQIKEIENQLRRTSIQEPTEISLSSKPRAPRTTPFLQLNEIRNVKHDGIPAECTTIYNRGEHTSGMYAIRPSNSQVFHVYCDVISGSPWTLIQHRIDGSQNFNETWENYKYGFGRLDGEFWLGLEKIYSIVKQSNYVLRIELEDWKDNKHYIEYSFYLGNHETNYTLHLVAITGNVPNAIPENKDLVFSTWDHKAKGHFNCPEGYSGGWWWHDECGENNLNGKYNKPRAKSKPERRRGLSWKSQNGRLYSIKSTKMLIHPTDSESFE

SEQ ID NO: 3 - RNA, 80 nt, synthetic construct
  source 1..80: mol_type = other RNA
  modified_base 78..80: mod_base = OTHER; note = 2'-O-methylribonucleotide
  modified_base 77..80: mod_base = OTHER; note = Phosphorothioate linkage
gttttagagctagaaatagcaagttaaaataaggctagtccgttatcaacttgaaaaagtggcaccgagtcggtgctttt

SEQ ID NO: 4 - RNA, 80 nt, synthetic construct; identical to SEQ ID NO: 3
  source 1..80: mol_type = other RNA
  modified_base 1: mod_base = OTHER; note = 2'-O-methylribonucleotide
  modified_base 8..12: mod_base = OTHER; note = 2'-O-methylribonucleotide
  modified_base 14..22: mod_base = OTHER; note = 2'-O-methylribonucleotide
  modified_base 26: mod_base = OTHER; note = 2'-O-methylribonucleotide
  modified_base 28: mod_base = OTHER; note = 2'-O-methylribonucleotide
  modified_base 30: mod_base = OTHER; note = 2'-O-methylribonucleotide
  modified_base 32..37: mod_base = OTHER; note = 2'-O-methylribonucleotide
  modified_base 40..41: mod_base = OTHER; note = 2'-O-methylribonucleotide
  modified_base 46..47: mod_base = OTHER; note = 2'-O-methylribonucleotide
  modified_base 50..52: mod_base = OTHER; note = 2'-O-methylribonucleotide
  modified_base 54..61: mod_base = OTHER; note = 2'-O-methylribonucleotide
  modified_base 63..80: mod_base = OTHER; note = 2'-O-methylribonucleotide
  modified_base 77..80: mod_base = OTHER; note = Phosphorothioate linkage

SEQ ID NO: 5 - RNA, 20 nt, synthetic construct
  source 1..20: mol_type = other RNA
  modified_base 1..3: mod_base = OTHER; note = 2'-O-methyl ribonucleotide
  modified_base 1..4: mod_base = OTHER; note = phosphorothioate linkage
aagatacctgaataaccctc

SEQ ID NO: 6 - RNA, 20 nt, synthetic construct
  source 1..20: mol_type = other RNA
  modified_base 1..3: mod_base = OTHER; note = 2'-O-methyl ribonucleotide
  modified_base 1..4: mod_base = OTHER; note = phosphorothioate linkage
aagatacctgaataactctc

SEQ ID NO: 7 - DNA, 20 bp, synthetic construct
  source 1..20: mol_type = other DNA
  modified_base 1..3: mod_base = OTHER; note = 2'-O-methyl ribonucleotide
  modified_base 1..4: mod_base = OTHER; note = phosphorothioate linkage
  misc_feature 1..6: note = RNA
  misc_feature 7: note = DNA
  misc_feature 8: note = RNA
  misc_feature 9: note = DNA
  misc_feature 10..12: note = RNA
  misc_feature 13: note = DNA
  misc_feature 14..20: note = RNA
aagatacctgaataaccctc

SEQ ID NO: 8 - DNA, 20 bp, synthetic construct
  source 1..20: mol_type = other DNA
  modified_base 1..3: mod_base = OTHER; note = 2'-O-methyl ribonucleotide
  modified_base 1..4: mod_base = OTHER; note = phosphorothioate linkage
  misc_feature 1..6: note = RNA
  misc_feature 7: note = DNA
  misc_feature 8: note = RNA
  misc_feature 9: note = DNA
  misc_feature 10..12: note = RNA
  misc_feature 13: note = DNA
  misc_feature 14..20: note = RNA
aagatacctgaataactctc

SEQ ID NO: 9 - DNA, 20 bp, synthetic construct
  source 1..20: mol_type = other DNA
  modified_base 1: mod_base = OTHER; note = 2'-O-methyl ribonucleotide
  modified_base 3..4: mod_base = OTHER; note = 2'-O-methyl ribonucleotide
  modified_base 1..4: mod_base = OTHER; note = phosphorothioate linkage
  misc_feature 1: note = RNA
  misc_feature 2: note = DNA
  misc_feature 3..4: note = RNA
  misc_feature 5..11: note = DNA
  misc_feature 12..13: note = RNA
  misc_feature 14: note = DNA
  misc_feature 15: note = RNA
  misc_feature 16..18: note = DNA
  misc_feature 19..20: note = RNA
aagatacctgaataaccctc

SEQ ID NO: 10 - DNA, 20 bp, synthetic construct
  source 1..20: mol_type = other DNA
  modified_base 1: mod_base = OTHER; note = 2'-O-methyl ribonucleotide
  modified_base 3..4: mod_base = OTHER; note = 2'-O-methyl ribonucleotide
  modified_base 1..4: mod_base = OTHER; note = phosphorothioate linkage
  misc_feature 1: note = RNA
  misc_feature 2: note = DNA
  misc_feature 3..4: note = RNA
  misc_feature 5..11: note = DNA
  misc_feature 12..13: note = RNA
  misc_feature 14: note = DNA
  misc_feature 15: note = RNA
  misc_feature 16..18: note = DNA
  misc_feature 19..20: note = RNA
aagatacctgaataactctc

SEQ ID NO: 11 - DNA, 20 bp, synthetic construct
  source 1..20: mol_type = other DNA
  modified_base 1..2: mod_base = OTHER; note = 2'-O-methyl ribonucleotide
  modified_base 1..4: mod_base = OTHER; note = phosphorothioate linkage
  misc_feature 1..2: note = RNA
  misc_feature 3..7: note = DNA
  misc_feature 8..20: note = RNA
aagatacctgaataaccctc

SEQ ID NO: 12 - DNA, 20 bp, synthetic construct
  source 1..20: mol_type = other DNA
  modified_base 3..4: mod_base = OTHER; note = 2'-O-methyl ribonucleotide
  modified_base 1..4: mod_base = OTHER; note = phosphorothioate linkage
  misc_feature 1..2: note = DNA
  misc_feature 3..4: note = RNA
  misc_feature 5..11: note = RNA
  misc_feature 12..13: note = RNA
  misc_feature 14: note = DNA
  misc_feature 15: note = RNA
  misc_feature 16..18: note = DNA
  misc_feature 19..20: note = RNA
aagatacctgaataactctc

SEQ ID NO: 13 - DNA, 20 bp, synthetic construct
  source 1..20: mol_type = other DNA
  modified_base 3..4: mod_base = OTHER; note = 2'-O-methyl ribonucleotide
  modified_base 1..4: mod_base = OTHER; note = phosphorothioate linkage
  misc_feature 1..2: note = DNA
  misc_feature 3..4: note = RNA
  misc_feature 5..11: note = RNA
  misc_feature 12..13: note = RNA
  misc_feature 14: note = DNA
  misc_feature 15: note = RNA
  misc_feature 16..18: note = DNA
  misc_feature 19..20: note = RNA
aagatacctgaataaccctc

SEQ ID NO: 14 - DNA, 18 bp, synthetic construct
  source 1..18: mol_type = other DNA
  modified_base 3..4: mod_base = OTHER; note = 2'-O-methyl ribonucleotide
  modified_base 1..4: mod_base = OTHER; note = phosphorothioate linkage
  misc_feature 1..2: note = DNA
  misc_feature 3..4: note = RNA
  misc_feature 5..11: note = RNA
  misc_feature 12..13: note = RNA
  misc_feature 14: note = DNA
  misc_feature 15: note = RNA
  misc_feature 16..18: note = DNA
aagatacctgaataactc

SEQ ID NO: 15 - DNA, 20 bp, synthetic construct
  source 1..20: mol_type = other DNA
  modified_base 1: mod_base = OTHER; note = 2'-O-methyl ribonucleotide
  modified_base 1..4: mod_base = OTHER; note = phosphorothioate linkage
  misc_feature 1: note = RNA
  misc_feature 2..10: note = RNA
aagatacctgaataaccctc

SEQ ID NO: 16 - DNA, 20 bp, synthetic construct
  source 1..20: mol_type = other DNA
  modified_base 1: mod_base = OTHER; note = 2'-O-methyl ribonucleotide
  modified_base 1..4: mod_base = OTHER; note = phosphorothioate linkage
  misc_feature 1: note = RNA
  misc_feature 2..10: note = DNA
  misc_feature 11..20: note = RNA
aagatacctgaataactctc

SEQ ID NO: 17 - DNA, 20 bp, synthetic construct
  source 1..20: mol_type = other DNA
  modified_base 1..2: mod_base = OTHER; note = 2'-O-methyl ribonucleotide
  modified_base 1..4: mod_base = OTHER; note = phosphorothioate linkage
  misc_feature 1..2: note = RNA
  misc_feature 3..6: note = DNA
  misc_feature 7: note = RNA
  misc_feature 8: note = DNA
  misc_feature 9: note = RNA
  misc_feature 10: note = DNA
  misc_feature 11: note = RNA
  misc_feature 12: note = DNA
  misc_feature 13: note = RNA
  misc_feature 14: note = DNA
  misc_feature 15: note = RNA
  misc_feature 16: note = DNA
  misc_feature 17: note = RNA
  misc_feature 18: note = DNA
  misc_feature 19: note = RNA
  misc_feature 20: note = DNA
aagatacctgaataaccctc

SEQ ID NO: 18 - DNA, 20 bp, synthetic construct
  source 1..20: mol_type = other DNA
  modified_base 1..2: mod_base = OTHER; note = 2'-O-methyl ribonucleotide
  modified_base 1..4: mod_base = OTHER; note = phosphorothioate linkage
  misc_feature 1..2: note = RNA
  misc_feature 3..6: note = DNA
  misc_feature 7: note = RNA
  misc_feature 8: note = DNA
  misc_feature 9: note = RNA
  misc_feature 10: note = DNA
  misc_feature 11: note = RNA
  misc_feature 12: note = DNA
  misc_feature 13: note = RNA
  misc_feature 14: note = DNA
  misc_feature 15: note = RNA
  misc_feature 16: note = DNA
  misc_feature 17: note = RNA
  misc_feature 18: note = DNA
  misc_feature 19: note = RNA
  misc_feature 20: note = DNA
aagatacctgaataactctc

SEQ ID NO: 19 - DNA, 20 bp, synthetic construct
  source 1..20: mol_type = other DNA
  modified_base 1..2: mod_base = OTHER; note = 2'-O-methyl ribonucleotide
  modified_base 1..4: mod_base = OTHER; note = phosphorothioate linkage
  misc_feature 1..2: note = RNA
  misc_feature 3..10: note = DNA
  misc_feature 11: note = RNA
  misc_feature 12: note = DNA
  misc_feature 13: note = RNA
  misc_feature 14: note = DNA
  misc_feature 15: note = RNA
  misc_feature 16: note = DNA
  misc_feature 17: note = RNA
  misc_feature 18: note = DNA
  misc_feature 19: note = RNA
  misc_feature 20: note = DNA
aagatacctgaataaccctc

SEQ ID NO: 20 - DNA, 20 bp, synthetic construct
  source 1..20: mol_type = other DNA
  modified_base 1..2: mod_base = OTHER; note = 2'-O-methyl ribonucleotide
  modified_base 1..4: mod_base = OTHER; note = phosphorothioate linkage
  misc_feature 1..2: note = RNA
  misc_feature 3..10: note = DNA
  misc_feature 11: note = RNA
  misc_feature 12: note = DNA
  misc_feature 13: note = RNA
  misc_feature 14: note = DNA
  misc_feature 15: note = RNA
  misc_feature 16: note = DNA
  misc_feature 17: note = RNA
  misc_feature 18: note = DNA
  misc_feature 19: note = RNA
  misc_feature 20: note = DNA
aagatacctgaataactctc

SEQ ID NO: 21 - DNA, 20 bp, synthetic construct
  source 1..20: mol_type = other DNA
  modified_base 1..4: mod_base = OTHER; note = phosphorothioate linkage
  misc_feature 1..6: note = DNA
  misc_feature 7: note = RNA
  misc_feature 8..11: note = DNA
  misc_feature 12..20: note = DNA
aagatacctgaataaccctc

SEQ ID NO: 22 - DNA, 20 bp, synthetic construct
  source 1..20: mol_type = other DNA
  modified_base 1..4: mod_base = OTHER; note = phosphorothioate linkage
  misc_feature 1..6: note = DNA
  misc_feature 7: note = RNA
  misc_feature 8..11: note = DNA
  misc_feature 12..20: note = DNA
aagatacctgaataactctc

SEQ ID NO: 23 - DNA, 20 bp, synthetic construct
  source 1..20: mol_type = other DNA
  modified_base 1: mod_base = OTHER; note = 2'-O-methyl ribonucleotide
  modified_base 1..4: mod_base = OTHER; note = phosphorothioate linkage
  misc_feature 1: note = RNA
  misc_feature 2..10: note = DNA
  misc_feature 11: note = RNA
  misc_feature 12: note = DNA
  misc_feature 13: note = RNA
  misc_feature 14: note = DNA
  misc_feature 15: note = RNA
  misc_feature 16: note = DNA
  misc_feature 17: note = RNA
  misc_feature 18: note = DNA
  misc_feature 19: note = RNA
  misc_feature 20: note = DNA
aagatacctgaataaccctc

SEQ ID NO: 24 - DNA, 20 bp, synthetic construct
  source 1..20: mol_type = other DNA
  modified_base 1: mod_base = OTHER; note = 2'-O-methyl ribonucleotide
  modified_base 1..4: mod_base = OTHER; note = phosphorothioate linkage
  misc_feature 1: note = RNA
  misc_feature 2..10: note = DNA
  misc_feature 11: note = RNA
  misc_feature 12: note = DNA
  misc_feature 13: note = RNA
  misc_feature 14: note = DNA
  misc_feature 15: note = RNA
  misc_feature 16: note = DNA
  misc_feature 17: note = RNA
  misc_feature 18: note = DNA
  misc_feature 19: note = RNA
  misc_feature 20: note = DNA
aagatacctgaataactctc

SEQ ID NO: 25 - DNA, 20 bp, synthetic construct
  source 1..20: mol_type = other DNA
  modified_base 1..2: mod_base = OTHER; note = 2'-O-methyl ribonucleotide
  modified_base 1..4: mod_base = OTHER; note = phosphorothioate linkage
  misc_feature 1..2: note = RNA
  misc_feature 3..8: note = DNA
  misc_feature 9..20: note = RNA
aagatacctgaataaccctc

SEQ ID NO: 26 - DNA, 20 bp, synthetic construct
  source 1..20: mol_type = other DNA
  modified_base 1..3: mod_base = OTHER; note = 2'-O-methyl ribonucleotide
  modified_base 1..4: mod_base = OTHER; note = phosphorothioate linkage
  misc_feature 1..3: note = RNA
  misc_feature 4..7: note = DNA
  misc_feature 8: note = RNA
  misc_feature 9..10: note = DNA
  misc_feature 11..12: note = RNA
  misc_feature 13..14: note = DNA
  misc_feature 15..20: note = RNA
aagatacctgaataaccctc

SEQ ID NO: 27 - DNA, 20 bp, synthetic construct
  source 1..20: mol_type = other DNA
  modified_base 1..3: mod_base = OTHER; note = 2'-O-methyl ribonucleotide
  modified_base 1..4: mod_base = OTHER; note = phosphorothioate linkage
  misc_feature 1..3: note = RNA
  misc_feature 4..7: note = DNA
  misc_feature 8: note = RNA
  misc_feature 9..10: note = DNA
  misc_feature 11..12: note = RNA
  misc_feature 13..14: note = DNA
  misc_feature 15..20: note = RNA
aagatacctgaataactctc

SEQ ID NO: 28 - DNA, 20 bp, synthetic construct
  source 1..20: mol_type = other DNA
  modified_base 1..2: mod_base = OTHER; note = 2'-O-methyl ribonucleotide
  modified_base 1..4: mod_base = OTHER; note = phosphorothioate linkage
  misc_feature 1..2: note = RNA
  misc_feature 3..4: note = DNA
  misc_feature 5: note = RNA
  misc_feature 6..7: note = DNA
  misc_feature 8..20: note = RNA
aagatacctgaataaccctc

SEQ ID NO: 29 - DNA, 20 bp, synthetic construct
  source 1..20: mol_type = other DNA
  modified_base 1..2: mod_base = OTHER; note = 2'-O-methyl ribonucleotide
  modified_base 1..4: mod_base = OTHER; note = phosphorothioate linkage
  misc_feature 1..2: note = RNA
  misc_feature 3..4: note = DNA
  misc_feature 5: note = RNA
  misc_feature 6..7: note = DNA
  misc_feature 8..20: note = RNA
aagatacctgaataactctc

SEQ ID NO: 30 - DNA, 20 bp, synthetic construct
  source 1..20: mol_type = other DNA
  modified_base 1..2: mod_base = OTHER; note = 2'-O-methyl ribonucleotide
  modified_base 1..4: mod_base = OTHER; note = phosphorothioate linkage
  misc_feature 1..2: note = RNA
  misc_feature 3..4: note = DNA
  misc_feature 5: note = RNA
  misc_feature 6..8: note = DNA
  misc_feature 9..20: note = RNA
aagatacctgaataaccctc

SEQ ID NO: 31 - DNA, 20 bp, synthetic construct
  source 1..20: mol_type = other DNA
  modified_base 1..2: mod_base = OTHER; note = 2'-O-methyl ribonucleotide
  modified_base 1..4: mod_base = OTHER; note = phosphorothioate linkage
  misc_feature 1..2: note = RNA
  misc_feature 3..4: note = DNA
  misc_feature 5: note = RNA
  misc_feature 6..8: note = DNA
  misc_feature 9..20: note = RNA
aagatacctgaataactctc

SEQ ID NO: 32 - DNA, 20 bp, synthetic construct
  source 1..20: mol_type = other DNA
  modified_base 1..3: mod_base = OTHER; note = 2'-O-methyl ribonucleotide
  modified_base 1..4: mod_base = OTHER; note = phosphorothioate linkage
  misc_feature 1..9: note = RNA
  misc_feature 10: note = DNA
  misc_feature 11..12: note = RNA
  misc_feature 13: note = DNA
  misc_feature 14..17: note = RNA
  misc_feature 18: note = DNA
  misc_feature 19..20: note = RNA
aagatacctgaataaccctc

SEQ ID NO: 33 - DNA, 20 bp, synthetic construct
  source 1..20: mol_type = other DNA
  modified_base 1..3: mod_base = OTHER; note = 2'-O-methyl ribonucleotide
  modified_base 1..4: mod_base = OTHER; note = phosphorothioate linkage
  misc_feature 1..5: note = RNA
  misc_feature 6: note = DNA
  misc_feature 7..15: note = RNA
  misc_feature 16: note = DNA
  misc_feature 17..20: note = RNA
aagatacctgaataaccctc

SEQ ID NO: 34 - DNA, 20 bp, synthetic construct
  source 1..20: mol_type = other DNA
  modified_base 1..3: mod_base = OTHER; note = 2'-O-methyl ribonucleotide
  modified_base 1..4: mod_base = OTHER; note = phosphorothioate linkage
  misc_feature 1..5: note = RNA
  misc_feature 6: note = DNA
  misc_feature 7..15: note = RNA
  misc_feature 16: note = DNA
  misc_feature 17..20: note = RNA
aagatacctgaataactctc

SEQ ID NO: 35 - DNA, 20 bp, synthetic construct
  source 1..20: mol_type = other DNA
  modified_base 1..3: mod_base = OTHER; note = 2'-O-methyl ribonucleotide
  modified_base 1..4: mod_base = OTHER; note = phosphorothioate linkage
  misc_feature 1..4: note = RNA
  misc_feature 5: note = DNA
  misc_feature 6: note = RNA
  misc_feature 7: note = DNA
  misc_feature 8: note = RNA
  misc_feature 9: note = DNA
  misc_feature 10: note = RNA
  misc_feature 11: note = DNA
  misc_feature 12: note = RNA
  misc_feature 13: note = DNA
  misc_feature 14: note = RNA
  misc_feature 15: note = DNA
  misc_feature 16: note = RNA
  misc_feature 17: note = DNA
  misc_feature 18: note = RNA
  misc_feature 19: note = DNA
  misc_feature 20: note = RNA
aagatacctgaataaccctc

SEQ ID NO: 36 - DNA, 20 bp, synthetic construct
  source 1..20: mol_type = other DNA
  modified_base 1..3: mod_base = OTHER; note = 2'-O-methyl ribonucleotide
  modified_base 1..4: mod_base = OTHER; note = phosphorothioate linkage
  misc_feature 1..4: note = RNA
  misc_feature 5: note = DNA
  misc_feature 6: note = RNA
  misc_feature 7: note = DNA
  misc_feature 8: note = RNA
  misc_feature 9: note = DNA
  misc_feature 10: note = RNA
  misc_feature 11: note = DNA
  misc_feature 12: note = RNA
  misc_feature 13: note = DNA
  misc_feature 14: note = RNA
  misc_feature 15: note = DNA
  misc_feature 16: note = RNA
  misc_feature 17: note = DNA
  misc_feature 18: note = RNA
  misc_feature 19: note = DNA
  misc_feature 20: note = RNA
aagatacctgaataactctc

SEQ ID NO: 37 - DNA, 20 bp, synthetic construct
  source 1..20: mol_type = other DNA
  modified_base 1..3: mod_base = OTHER; note = 2'-O-methyl ribonucleotide
  modified_base 1..4: mod_base = OTHER; note = phosphorothioate linkage
  misc_feature 1..3: note = RNA
  misc_feature 4..10: note = DNA
  misc_feature 11..20: note = RNA
aagatacctgaataaccctc

SEQ ID NO: 38 - DNA, 20 bp, synthetic construct
  source 1..20: mol_type = other DNA
  modified_base 1..3: mod_base = OTHER; note = 2'-O-methyl ribonucleotide
  modified_base 1..4: mod_base = OTHER; note = phosphorothioate linkage
  misc_feature 1..3: note = RNA
  misc_feature 4..10: note = DNA
  misc_feature 11..20: note = RNA
aagatacctgaataactctc

SEQ ID NO: 39 - DNA, 20 bp, synthetic construct
  source 1..20: mol_type = other DNA
  modified_base 1..2: mod_base = OTHER; note = 2'-O-methyl ribonucleotide
  modified_base 1..4: mod_base = OTHER; note = phosphorothioate linkage
  misc_feature 1..2: note = RNA
  misc_feature 3..9: note = DNA
  misc_feature 10..20: note = RNA
aagatacctgaataaccctc

SEQ ID NO: 40 - DNA, 20 bp, synthetic construct
  source 1..20: mol_type = other DNA
  modified_base 1..2: mod_base = OTHER; note = 2'-O-methyl ribonucleotide
  modified_base 1..4: mod_base = OTHER; note = phosphorothioate linkage
  misc_feature 1..2: note = RNA
  misc_feature 3..9: note = DNA
  misc_feature 10..20: note = RNA
aagatacctgaataactctc

SEQ ID NO: 41 - DNA, 20 bp, synthetic construct
  source 1..20: mol_type = other DNA
  modified_base 1..2: mod_base = OTHER; note = 2'-O-methyl ribonucleotide
  modified_base 1..4: mod_base = OTHER; note = phosphorothioate linkage
  misc_feature 1..2: note = RNA
  misc_feature 3..4: note = DNA
  misc_feature 5: note = RNA
  misc_feature 6..9: note = DNA
  misc_feature 10..20: note = RNA
aagatacctgaataaccctc

SEQ ID NO: 42 - DNA, 20 bp, synthetic construct
  source 1..20: mol_type = other DNA
  modified_base 1..2: mod_base = OTHER; note = 2'-O-methyl ribonucleotide
  modified_base 1..4: mod_base = OTHER; note = phosphorothioate linkage
  misc_feature 1..2: note = RNA
  misc_feature 3..4: note = DNA
  misc_feature 5: note = RNA
  misc_feature 6..9: note = DNA
  misc_feature 10..20: note = RNA
aagatacctgaataactctc

SEQ ID NO: 43 - DNA, 20 bp, synthetic construct
  source 1..20: mol_type = other DNA
  modified_base 1..2: mod_base = OTHER; note = 2'-O-methyl ribonucleotide
  modified_base 1..4: mod_base = OTHER; note = phosphorothioate linkage
  misc_feature 1..2: note = RNA
  misc_feature 3..10: note = DNA
  misc_feature 11..20: note = RNA
aagatacctgaataaccctc

SEQ ID NO: 44 - DNA, 20 bp, synthetic construct
  source 1..20: mol_type = other DNA
  modified_base 1..2: mod_base = OTHER; note = 2'-O-methyl ribonucleotide
  modified_base 1..4: mod_base = OTHER; note = phosphorothioate linkage
  misc_feature 1..2: note = RNA
  misc_feature 3..10: note = DNA
  misc_feature 11..20: note = RNA
aagatacctgaataactctc

SEQ ID NO: 45 - DNA, 20 bp, synthetic construct
  source 1..20: mol_type = other DNA
  modified_base 1..2: mod_base = OTHER; note = 2'-O-methyl ribonucleotide
  modified_base 1..4: mod_base = OTHER; note = phosphorothioate linkage
  misc_feature 1..2: note = RNA
  misc_feature 3..4: note = DNA
  misc_feature 5: note = RNA
  misc_feature 6..10: note = DNA
  misc_feature 11..20: note = RNA
aagatacctgaataaccctc

SEQ ID NO: 46 - DNA, 20 bp, synthetic construct
  source 1..20: mol_type = other DNA
  modified_base 1..2: mod_base = OTHER; note = 2'-O-methyl ribonucleotide
  modified_base 1..4: mod_base = OTHER; note = phosphorothioate linkage
  misc_feature 1..2: note = RNA
  misc_feature 3..4: note = DNA
  misc_feature 5..6: note = RNA
  misc_feature 7..9: note = DNA
  misc_feature 11..20: note = RNA
aagatacctgaataaccctc

SEQ ID NO: 47 - DNA, 20 bp, synthetic construct
  source 1..20: mol_type = other DNA
  modified_base 1..2: mod_base = OTHER; note = 2'-O-methyl ribonucleotide
  modified_base 1..4: mod_base = OTHER; note = phosphorothioate linkage
  misc_feature 1..2: note = RNA
  misc_feature 3..4: note = DNA
  misc_feature 5..6: note = RNA
  misc_feature 7..10: note = DNA
  misc_feature 11..20: note = RNA
aagatacctgaataaccctc

SEQ ID NO: 48 - DNA, 20 bp, synthetic construct
  source 1..20: mol_type = other DNA
  modified_base 1..2: mod_base = OTHER; note = 2'-O-methyl ribonucleotide
  modified_base 1..4: mod_base = OTHER; note = phosphorothioate linkage
  misc_feature 1..2: note = RNA
  misc_feature 3..5: note = DNA
  misc_feature 6: note = RNA
  misc_feature 7: note = DNA
  misc_feature 8: note = RNA
  misc_feature 9: note = DNA
  misc_feature 10..20: note = RNA
aagatacctgaataaccctc

SEQ ID NO: 49 - DNA, 20 bp, synthetic construct
  source 1..20: mol_type = other DNA
  modified_base 1..3: mod_base = OTHER; note = 2'-O-methyl ribonucleotide
  modified_base 1..4: mod_base = OTHER; note = phosphorothioate linkage
  misc_feature 1..3: note = RNA
  misc_feature 4: note = DNA
  misc_feature 5: note = RNA
  misc_feature 6: note = DNA
  misc_feature 7: note = RNA
  misc_feature 8: note = DNA
  misc_feature 9: note = RNA
  misc_feature 10: note = DNA
  misc_feature 11..20: note = RNA
aagatacctgaataaccctc

SEQ ID NO: 50 - DNA, 20 bp, synthetic construct
  source 1..20: mol_type = other DNA
  modified_base 1..3: mod_base = OTHER; note = 2'-O-methyl ribonucleotide
  modified_base 1..4: mod_base = OTHER; note = phosphorothioate linkage
  misc_feature 1..8: note = RNA
  misc_feature 9: note = DNA
  misc_feature 10..12: note = RNA
  misc_feature 13: note = DNA
  misc_feature 14..20: note = RNA
aagatacctgaataaccctc

SEQ ID NO: 51 - DNA, 20 bp, synthetic construct
  source 1..20: mol_type = other DNA
  modified_base 1..3: mod_base = OTHER; note = 2'-O-methyl ribonucleotide
  modified_base 1..4: mod_base = OTHER; note = phosphorothioate linkage
  misc_feature 1..3: note = RNA
  misc_feature 4: note = DNA
  misc_feature 5: note = RNA
  misc_feature 6: note = DNA
  misc_feature 7: note = RNA
  misc_feature 8: note = DNA
  misc_feature 9: note = RNA
  misc_feature 10: note = DNA
  misc_feature 11: note = RNA
  misc_feature 12: note = DNA
  misc_feature 13: note = RNA
  misc_feature 14: note = DNA
  misc_feature 15: note = RNA
  misc_feature 16: note = DNA
  misc_feature 17: note = RNA
  misc_feature 18: note = DNA
  misc_feature 19: note = RNA
  misc_feature 20: note = DNA
aagatacctgaataaccctc

SEQ ID NO: 52 - DNA, 20 bp, synthetic construct
  source 1..20: mol_type = other DNA
  modified_base 1..3: mod_base = OTHER; note = 2'-O-methyl ribonucleotide
  modified_base 1..4: mod_base = OTHER; note = phosphorothioate linkage
  misc_feature 1..3: note = RNA
  misc_feature 4: note = DNA
  misc_feature 5: note = RNA
  misc_feature 6: note = DNA
  misc_feature 7: note = RNA
  misc_feature 8: note = DNA
  misc_feature 9: note = RNA
  misc_feature 10: note = DNA
  misc_feature 11: note = RNA
  misc_feature 12: note = DNA
  misc_feature 13: note = RNA
  misc_feature 14: note = DNA
  misc_feature 15: note = RNA
  misc_feature 16: note = DNA
  misc_feature 17: note = RNA
  misc_feature 18: note = DNA
  misc_feature 19: note = RNA
  misc_feature 20: note = DNA
aagatacctgaataactctc

SEQ ID NO: 53 - DNA, 20 bp, synthetic construct
  source 1..20: mol_type = other DNA
  modified_base 1..3: mod_base = OTHER; note = 2'-O-methyl ribonucleotide
  modified_base 1..4: mod_base = OTHER; note = phosphorothioate linkage
  misc_feature 1..11: note = RNA
  misc_feature 12: note = DNA
  misc_feature 13: note = RNA
  misc_feature 14..20: note = DNA
aagatacctgaataaccctc

SEQ ID NO: 54 - DNA, 19 bp, synthetic construct
  source 1..19: mol_type = other DNA
  modified_base 1: mod_base = OTHER; note = 2'-O-methyl ribonucleotide
  modified_base 1..3: mod_base = OTHER; note = phosphorothioate linkage
  misc_feature 1: note = RNA
  misc_feature 2: note = DNA
  misc_feature 3..5: note = RNA
  misc_feature 6: note = DNA
  misc_feature 7..10: note = RNA
  misc_feature 11: note = DNA
  misc_feature 12: note = RNA
  misc_feature 13: note = DNA
  misc_feature 14..19: note = RNA
agatacctgaataaccctc

SEQ ID NO: 55 - DNA, 20 bp, synthetic construct
  source 1..20: mol_type = other DNA
  modified_base 1..4: mod_base = OTHER; note = phosphorothioate linkage
  misc_feature 1..10: note = DNA
  misc_feature 11..20: note = RNA
aagatacctgaataaccctc

SEQ ID NO: 56 - DNA, 20 bp, synthetic construct
  source 1..20: mol_type = other DNA
  modified_base 1..3: mod_base = OTHER; note = 2'-O-methyl ribonucleotide
  modified_base 1..4: mod_base = OTHER; note = phosphorothioate linkage
  misc_feature 1..3: note = RNA
  misc_feature 4..6: note = DNA
  misc_feature 7: note = RNA
  misc_feature 8..11: note = DNA
  misc_feature 12..20: note = RNA
aagatacctgaataaccctc

SEQ ID NO: 57 - DNA, 20 bp, synthetic construct
  source 1..20: mol_type = other DNA
  modified_base 1: mod_base = OTHER; note = 2'-O-methyl ribonucleotide
  modified_base 3: mod_base = OTHER; note = 2'-O-methyl ribonucleotide
  modified_base 1..4: mod_base = OTHER; note = phosphorothioate linkage
  misc_feature 1: note = RNA
  misc_feature 2: note = DNA
  misc_feature 3: note = RNA
  misc_feature 4..8: note = DNA
  misc_feature 9..10: note = RNA
  misc_feature 11..12: note = DNA
  misc_feature 13..20: note = RNA
aagatacctgaataaccctc

SEQ ID NO: 58 - DNA, 20 bp, synthetic construct
  source 1..20: mol_type = other DNA
  modified_base 1..2: mod_base = OTHER; note = 2'-O-methyl ribonucleotide
  modified_base 1..4: mod_base = OTHER; note = phosphorothioate linkage
  misc_feature 1..2: note = RNA
  misc_feature 3..6: note = DNA
  misc_feature 7: note = RNA
  misc_feature 8..11: note = DNA
  misc_feature 12..20: note = RNA
aagatacctgaataaccctc

SEQ ID NO: 59 - DNA, 20 bp, synthetic construct
  source 1..20: mol_type = other DNA
  modified_base 1..3: mod_base = OTHER; note = 2'-O-methyl ribonucleotide
  modified_base 1..4: mod_base = OTHER; note = phosphorothioate linkage
  misc_feature 1..3: note = RNA
  misc_feature 4..7: note = DNA
  misc_feature 8..11: note = RNA
  misc_feature 12..13: note = DNA
  misc_feature 14..19: note = RNA
  misc_feature 20: note = DNA
aagatacctgaataaccctc

SEQ ID NO: 60 - DNA, 20 bp, synthetic construct
  source 1..20: mol_type = other DNA
  modified_base 2..3: mod_base = OTHER; note = 2'-O-methyl ribonucleotide
  modified_base 1..4: mod_base = OTHER; note = phosphorothioate linkage
  misc_feature 1..3: note = RNA
  misc_feature 4..7: note = DNA
  misc_feature 7..10: note = RNA
  misc_feature 11..12: note = DNA
  misc_feature 13..19: note = RNA
  misc_feature 20: note = DNA
aagatacctgaataaccctc

SEQ ID NO: 61 - DNA, 20 bp, synthetic construct
  source 1..20: mol_type = other DNA
  modified_base 2..3: mod_base = OTHER; note = 2'-O-methyl ribonucleotide
  modified_base 1..4: mod_base = OTHER; note = phosphorothioate linkage
  misc_feature 1: note = DNA
  misc_feature 2..3: note = RNA
  misc_feature 4..5: note = DNA
  misc_feature 6: note = RNA
  misc_feature 7..11: note = DNA
  misc_feature 12: note = RNA
  misc_feature 13: note = DNA
  misc_feature 14..16: note = RNA
  misc_feature 17: note = DNA
  misc_feature 18..20: note = RNA
aagatacctgaataaccctc

SEQ ID NO: 62 - DNA, 20 bp, synthetic construct
  source 1..20: mol_type = other DNA
  modified_base 1..3: mod_base = OTHER; note = 2'-O-methyl ribonucleotide
  modified_base 1..4: mod_base = OTHER; note = phosphorothioate linkage
  misc_feature 1..3: note = RNA
  misc_feature 4..5: note = DNA
  misc_feature 6: note = RNA
  misc_feature 7..11: note = DNA
  misc_feature 12: note = RNA
  misc_feature 13: note = DNA
  misc_feature 14..16: note = RNA
  misc_feature 17: note = DNA
  misc_feature 18..20: note = RNA
aagatacctgaataaccctc

SEQ ID NO: 63 - DNA, 20 bp, synthetic construct
  source 1..20: mol_type = other DNA
  modified_base 1..2: mod_base = OTHER; note = 2'-O-methyl ribonucleotide
  modified_base 1..4: mod_base = OTHER; note = phosphorothioate linkage
  misc_feature 1..2: note = RNA
  misc_feature 3..6: note = DNA
  misc_feature 7..20: note = RNA
aagatacctgaataaccctc

SEQ ID NO: 64 - DNA, 20 bp, synthetic construct
  source 1..20: mol_type = other DNA
  modified_base 1..2: mod_base = OTHER; note = 2'-O-methyl ribonucleotide
  modified_base 1..4: mod_base = OTHER; note = phosphorothioate linkage
  misc_feature 1..2: note = RNA
  misc_feature 3..6: note = DNA
  misc_feature 7..20: note = RNA
aagatacctgaataactctc

SEQ ID NO: 65 - DNA, 20 bp, synthetic construct
  source 1..20: mol_type = other DNA
  modified_base 1: mod_base = OTHER; note = 2'-O-methyl ribonucleotide
  modified_base 1..4: mod_base = OTHER; note = phosphorothioate linkage
  misc_feature 1: note = RNA
  misc_feature 2..6: note = DNA
  misc_feature 7: note = RNA
  misc_feature 8: note = DNA
  misc_feature 9: note = RNA
  misc_feature 10: note = DNA
  misc_feature 11: note = RNA
  misc_feature 12: note = DNA
  misc_feature 13: note = RNA
  misc_feature 14: note = DNA
  misc_feature 15: note = RNA
  misc_feature 16: note = DNA
  misc_feature 17: note = RNA
  misc_feature 18: note = DNA
  misc_feature 19: note = RNA
  misc_feature 20: note = DNA
aagatacctgaataaccctc

SEQ ID NO: 66 - DNA, 20 bp, synthetic construct
  source 1..20: mol_type = other DNA
  modified_base 1: mod_base = OTHER; note = 2'-O-methyl ribonucleotide
  modified_base 1..4: mod_base = OTHER; note = phosphorothioate linkage
  misc_feature 1: note = RNA
  misc_feature 2..6: note = DNA
  misc_feature 7: note = RNA
  misc_feature 8: note = DNA
  misc_feature 9: note = RNA
  misc_feature 10: note = DNA
  misc_feature 11: note = RNA
  misc_feature 12: note = DNA
  misc_feature 13: note = RNA
  misc_feature 14: note = DNA
  misc_feature 15: note = RNA
  misc_feature 16: note = DNA
  misc_feature 17: note = RNA
  misc_feature 18: note = DNA
  misc_feature 19: note = RNA
  misc_feature 20: note = DNA
aagatacctgaataactctc

SEQ ID NO: 67 - DNA, 20 bp, synthetic construct
  source 1..20: mol_type = other DNA
  modified_base 3..4: mod_base = OTHER; note = 2'-O-methyl ribonucleotide
  modified_base 1..4: mod_base = OTHER; note = phosphorothioate linkage
  misc_feature 1..2: note = DNA
  misc_feature 3..4: note = RNA
  misc_feature 5..11: note = DNA
  misc_feature 12..13: note = RNA
  misc_feature 14: note = DNA
  misc_feature 15: note = RNA
  misc_feature 16: note = DNA
  misc_feature 17: note = RNA
  misc_feature 18: note = DNA
  misc_feature 19..20: note = RNA
aagatacctgaataaccctc

SEQ ID NO: 68 - DNA, 20 bp, synthetic construct
  source 1..20: mol_type = other DNA
  modified_base 3..4: mod_base = OTHER; note = 2'-O-methyl ribonucleotide
  modified_base 1..4: mod_base = OTHER; note = phosphorothioate linkage
  misc_feature 1..2: note = DNA
  misc_feature 3..4: note = RNA
  misc_feature 5..11: note = DNA
  misc_feature 12..13: note = RNA
  misc_feature 14: note = DNA
  misc_feature 15..16: note = RNA
  misc_feature 17: note = DNA
  misc_feature 18..20: note = RNA
aagatacctgaataaccctc

SEQ ID NO: 69 - RNA, 100 nt, synthetic construct
  source 1..100: mol_type = other RNA
  modified_base 1..3: mod_base = OTHER; note = 2'-O-methyl ribonucleotide
  modified_base 1..4: mod_base = OTHER; note = phosphorothioate linkage
  modified_base 97..100: mod_base = OTHER; note = phosphorothioate linkage
aagatacctgaataaccctcgttttagagctagaaatagcaagttaaaataaggctagtccgttatcaacttgaaaaagtggcaccgagtcggtgctttt

SEQ ID NO: 70 - RNA, 100 nt, synthetic construct; identical to SEQ ID NO: 69
  source 1..100: mol_type = other RNA
  modified_base 1..3: mod_base = OTHER; note = 2'-O-methyl ribonucleotide
  modified_base 21: mod_base = OTHER; note = 2'-O-methyl ribonucleotide
  modified_base 28..32: mod_base = OTHER; note = 2'-O-methyl ribonucleotide
  modified_base 34..42: mod_base = OTHER; note = 2'-O-methyl ribonucleotide
  modified_base 46: mod_base = OTHER; note = 2'-O-methyl ribonucleotide
  modified_base 48: mod_base = OTHER; note = 2'-O-methyl ribonucleotide
  modified_base 50: mod_base = OTHER; note = 2'-O-methyl ribonucleotide
  modified_base 52..57: mod_base = OTHER; note = 2'-O-methyl ribonucleotide
  modified_base 60..61: mod_base = OTHER; note = 2'-O-methyl ribonucleotide
  modified_base 66..67: mod_base = OTHER; note = 2'-O-methyl ribonucleotide
  modified_base 70..72: mod_base = OTHER; note = 2'-O-methyl ribonucleotide
  modified_base 74..81: mod_base = OTHER; note = 2'-O-methyl ribonucleotide
  modified_base 83..100: mod_base = OTHER; note = 2'-O-methyl ribonucleotide
  modified_base 1..4: mod_base = OTHER; note = phosphorothioate linkage
  modified_base 97..100: mod_base = OTHER; note = phosphorothioate linkage

SEQ ID NO: 71 - RNA, 100 nt, synthetic construct
  source 1..100: mol_type = other RNA
  modified_base 1..3: mod_base = OTHER; note = 2'-O-methyl ribonucleotide
  modified_base 21: mod_base = OTHER; note = 2'-O-methyl ribonucleotide
  modified_base 28..32: mod_base = OTHER; note = 2'-O-methyl ribonucleotide
  modified_base 34..42: mod_base = OTHER; note = 2'-O-methyl ribonucleotide
  modified_base 46: mod_base = OTHER; note = 2'-O-methyl ribonucleotide
  modified_base 48: mod_base = OTHER; note = 2'-O-methyl ribonucleotide
  modified_base 50: mod_base = OTHER; note = 2'-O-methyl ribonucleotide
  modified_base 52..57: mod_base = OTHER; note = 2'-O-methyl ribonucleotide
  modified_base 60..61: mod_base = OTHER; note = 2'-O-methyl ribonucleotide
  modified_base 66..67: mod_base = OTHER; note = 2'-O-methyl ribonucleotide
  modified_base 70..72: mod_base = OTHER; note = 2'-O-methyl ribonucleotide
  modified_base 74..81: mod_base = OTHER; note = 2'-O-methyl ribonucleotide
  modified_base 83..100: mod_base = OTHER; note = 2'-O-methyl ribonucleotide
  modified_base 1..4: mod_base = OTHER; note = phosphorothioate linkage
  modified_base 97..100: mod_base = OTHER; note = phosphorothioate linkage
aagatacctgaataactctcgttttagagctagaaatagcaagttaaaataaggctagtccgttatcaacttgaaaaagtggcaccgagtcggtgctttt

SEQ ID NO: 72 - DNA, 100 bp, synthetic construct
  source 1..100: mol_type = other DNA
  modified_base 1..3: mod_base = OTHER; note = 2'-O-methyl ribonucleotide
  modified_base 98..100: mod_base = OTHER; note = phosphorothioate linkage
  modified_base 1..4: mod_base = OTHER; note = phosphorothioate linkage
  modified_base 97..100: mod_base = OTHER; note = phosphorothioate linkage
  misc_feature 1..6: note = RNA
  misc_feature 7: note = DNA
  misc_feature 8: note = RNA
  misc_feature 9: note = DNA
  misc_feature 10..12: note = RNA
  misc_feature 13: note = DNA
  misc_feature 14..100: note = RNA
aagatacctgaataaccctcgttttagagctagaaatagcaagttaaaataaggctagtccgttatcaacttgaaaaagtggcaccgagtcggtgctttt

SEQ ID NO: 73 - DNA, 100 bp, synthetic construct
  source 1..100: mol_type = other DNA
  modified_base 1..3: mod_base = OTHER; note = 2'-O-methyl ribonucleotide
  modified_base 98..100: mod_base = OTHER; note = phosphorothioate linkage
  modified_base 1..4: mod_base = OTHER; note = phosphorothioate linkage
  modified_base 97..100: mod_base = OTHER; note = phosphorothioate linkage
  misc_feature 1..6: note = RNA
  misc_feature 7: note = DNA
  misc_feature 8: note = RNA
  misc_feature 9: note = DNA
  misc_feature 10..12: note = RNA
  misc_feature 13: note = DNA
  misc_feature 14..100: note = RNA
aagatacctgaataactctcgttttagagctagaaatagcaagttaaaataaggctagtccgttatcaacttgaaaaagtggcaccgagtcggtgctttt

SEQ ID NO: 74 - DNA, 100 bp, synthetic construct; identical to SEQ ID NO: 73
  source 1..100: mol_type = other DNA
  modified_base 1..3: mod_base = OTHER; note = 2'-O-methyl ribonucleotide
  modified_base 21: mod_base = OTHER; note = 2'-O-methyl ribonucleotide
  modified_base 28..32: mod_base = OTHER; note = 2'-O-methyl ribonucleotide
  modified_base 34..42: mod_base = OTHER; note = 2'-O-methyl ribonucleotide
  modified_base 46: mod_base = OTHER; note = 2'-O-methyl ribonucleotide
  modified_base 48: mod_base = OTHER; note = 2'-O-methyl ribonucleotide
  modified_base 52..57: mod_base = OTHER; note = 2'-O-methyl ribonucleotide
  modified_base 60..61: mod_base = OTHER; note = 2'-O-methyl ribonucleotide
  modified_base 66..67: mod_base = OTHER; note = 2'-O-methyl ribonucleotide
  modified_base 70..72: mod_base = OTHER; note = 2'-O-methyl ribonucleotide
  modified_base 74..81: mod_base = OTHER; note = 2'-O-methyl ribonucleotide
  modified_base 83..100: mod_base = OTHER; note = 2'-O-methyl ribonucleotide
  modified_base 1..4: mod_base = OTHER; note = phosphorothioate linkage
  modified_base 97..100: mod_base = OTHER; note = phosphorothioate linkage
  misc_feature 1..6: note = RNA
  misc_feature 7: note = DNA
  misc_feature 8: note = RNA
  misc_feature 9: note = DNA
  misc_feature 10..12: note = RNA
  misc_feature 13: note = DNA
  misc_feature 14..100: note = RNA

SEQ ID NO: 75 - DNA, 100 bp, synthetic construct; identical to SEQ ID NO: 72
  source 1..100: mol_type = other DNA
  modified_base 1: mod_base = OTHER; note = 2'-O-methyl ribonucleotide
  modified_base 3..4: mod_base = OTHER; note = 2'-O-methyl ribonucleotide
  modified_base 13: mod_base = OTHER; note = 2'-O-methyl ribonucleotide
  modified_base 98..100: mod_base = OTHER; note = 2'-O-methyl ribonucleotide
  modified_base 1..4: mod_base = OTHER; note = phosphorothioate linkage
  modified_base 97..100: mod_base = OTHER; note = phosphorothioate linkage
  misc_feature 1: note = RNA
  misc_feature 2: note = DNA
  misc_feature 3..4: note = RNA
  misc_feature 5..11: note = DNA
  misc_feature 12..13: note = RNA
  misc_feature 14: note = DNA
  misc_feature 15: note = RNA
  misc_feature 16..18: note = DNA
  misc_feature 19..100: note = RNA

SEQ ID NO: 76 - DNA, 100 bp, synthetic construct; identical to SEQ ID NO: 72
  source 1..100: mol_type = other DNA
  modified_base 1: mod_base = OTHER; note = 2'-O-methyl ribonucleotide
  modified_base 3..4: mod_base = OTHER; note = 2'-O-methyl ribonucleotide
  modified_base 21: mod_base = OTHER; note = 2'-O-methyl ribonucleotide
  modified_base 28..32: mod_base = OTHER; note = 2'-O-methyl ribonucleotide
  modified_base 34..42: mod_base = OTHER; note = 2'-O-methyl ribonucleotide
  modified_base 46: mod_base = OTHER; note = 2'-O-methyl ribonucleotide
  modified_base 48: mod_base = OTHER; note = 2'-O-methyl ribonucleotide
  modified_base 50: mod_base = OTHER; note = 2'-O-methyl ribonucleotide
  modified_base 52..57: mod_base = OTHER; note = 2'-O-methyl ribonucleotide
  modified_base 60..61: mod_base = OTHER; note = 2'-O-methyl ribonucleotide
  modified_base 66..67: mod_base = OTHER; note = 2'-O-methyl ribonucleotide
  modified_base 70..72: mod_base = OTHER; note = 2'-O-methyl ribonucleotide
  modified_base 74..81: mod_base = OTHER; note = 2'-O-methyl ribonucleotide
  modified_base 83..100: mod_base = OTHER; note = 2'-O-methyl ribonucleotide
  modified_base 1..4: mod_base = OTHER; note = phosphorothioate linkage
  modified_base 97..100: mod_base = OTHER; note = phosphorothioate linkage
  misc_feature 1: note = RNA
  misc_feature 2: note = DNA
  misc_feature 3..4: note = RNA
  misc_feature 5..11: note = DNA
  misc_feature 12..13: note = RNA
  misc_feature 14: note = DNA
  misc_feature 15: note = RNA
  misc_feature 16..18: note = DNA
  misc_feature 19..100: note = RNA

SEQ ID NO: 77 - DNA, 100 bp, synthetic construct; identical to SEQ ID NO: 73
  source 1..100: mol_type = other DNA
  modified_base 1: mod_base = OTHER; note = 2'-O-methyl ribonucleotide
  modified_base 3..4: mod_base = OTHER; note = 2'-O-methyl ribonucleotide
  modified_base 14: mod_base = OTHER; note = 2'-O-methyl ribonucleotide
  modified_base 98..100: mod_base = OTHER; note = 2'-O-methyl ribonucleotide
  modified_base 1..4: mod_base = OTHER; note = phosphorothioate linkage
  modified_base 97..100: mod_base = OTHER; note = phosphorothioate linkage
  misc_feature 1: note = RNA
  misc_feature 2: note = DNA
  misc_feature 3..4: note = RNA
  misc_feature 5..11: note = DNA
  misc_feature 12..13: note = RNA
  misc_feature 14: note = DNA
  misc_feature 15: note = RNA
  misc_feature 16..18: note = DNA
  misc_feature 19..100: note = RNA

SEQ ID NO: 78 - DNA, 100 bp, synthetic construct; identical to SEQ ID NO: 73
  source 1..100: mol_type = other DNA
  modified_base 1: mod_base = OTHER; note = 2'-O-methyl ribonucleotide
  modified_base 3..4: mod_base = OTHER; note = 2'-O-methyl ribonucleotide
  modified_base 13: mod_base = OTHER; note = 2'-O-methyl ribonucleotide
  modified_base 21: mod_base = OTHER; note = 2'-O-methyl ribonucleotide
  modified_base 28..32: mod_base = OTHER; note = 2'-O-methyl ribonucleotide
  modified_base 34..42: mod_base = OTHER; note = 2'-O-methyl ribonucleotide
  modified_base 46: mod_base = OTHER; note = 2'-O-methyl ribonucleotide
  modified_base 48: mod_base = OTHER; note = 2'-O-methyl ribonucleotide
  modified_base 50: mod_base = OTHER; note = 2'-O-methyl ribonucleotide
  modified_base 52..57: mod_base = OTHER; note = 2'-O-methyl ribonucleotide
  modified_base 60..61: mod_base = OTHER; note = 2'-O-methyl ribonucleotide
  modified_base 66..67: mod_base = OTHER; note = 2'-O-methyl ribonucleotide
  modified_base 70..72: mod_base = OTHER; note = 2'-O-methyl ribonucleotide
  modified_base 74..81: mod_base = OTHER; note = 2'-O-methyl ribonucleotide
  modified_base 83..100: mod_base = OTHER; note = 2'-O-methyl ribonucleotide
  modified_base 1..4: mod_base = OTHER; note = phosphorothioate linkage
  modified_base 97..100: mod_base = OTHER; note = phosphorothioate linkage
  misc_feature 1: note = RNA
  misc_feature 2: note = DNA
  misc_feature 3..4: note = RNA
  misc_feature 5..11: note = DNA
  misc_feature 12..13: note = RNA
  misc_feature 14: note = DNA
  misc_feature 15: note = RNA
  misc_feature 16..18: note = DNA
  misc_feature 19..100: note = RNA

SEQ ID NO: 79 - DNA, 100 bp, synthetic construct; identical to SEQ ID NO: 72
  source 1..100: mol_type = other DNA
  modified_base 1..2: mod_base = OTHER; note = 2'-O-methyl ribonucleotide
  modified_base 98..100: mod_base = OTHER; note = 2'-O-methyl ribonucleotide
  modified_base 1..4: mod_base = OTHER; note = phosphorothioate linkage
  modified_base 97..100: mod_base = OTHER; note = phosphorothioate linkage
  misc_feature 1..2: note = RNA
  misc_feature 3..7: note = DNA
  misc_feature 8..100: note = RNA

SEQ ID NO: 80 - DNA, 100 bp, synthetic construct; identical to SEQ ID NO: 72
  source 1..100: mol_type = other DNA
  modified_base 1..2: mod_base = OTHER; note = 2'-O-methyl ribonucleotide
  modified_base 21: mod_base = OTHER; note = 2'-O-methyl ribonucleotide
  modified_base 28..32: mod_base = OTHER; note = 2'-O-methyl ribonucleotide
  modified_base 34..42: mod_base = OTHER; note = 2'-O-methyl ribonucleotide
  modified_base 46: mod_base = OTHER; note = 2'-O-methyl ribonucleotide
  modified_base 48: mod_base = OTHER; note = 2'-O-methyl ribonucleotide
  modified_base 50: mod_base = OTHER; note = 2'-O-methyl ribonucleotide
  modified_base 52..57: mod_base = OTHER; note = 2'-O-methyl ribonucleotide
  modified_base 60..61: mod_base = OTHER; note = 2'-O-methyl ribonucleotide
  modified_base 66..67: mod_base = OTHER; note = 2'-O-methyl ribonucleotide
  modified_base 70..72: mod_base = OTHER; note = 2'-O-methyl ribonucleotide
  modified_base 74..81: mod_base = OTHER; note = 2'-O-methyl ribonucleotide
  modified_base 83..100: mod_base = OTHER; note = 2'-O-methyl ribonucleotide
  modified_base 1..4: mod_base = OTHER; note = phosphorothioate linkage
  modified_base 97..100: mod_base = OTHER; note = phosphorothioate linkage
  misc_feature 1..2: note = RNA
  misc_feature 3..7: note = DNA
  misc_feature 8..100: note = RNA

SEQ ID NO: 81 - DNA, 100 bp, synthetic construct; identical to SEQ ID NO: 73
  source 1..100: mol_type = other DNA
  modified_base 1..2: mod_base = OTHER; note = 2'-O-methyl ribonucleotide
  modified_base 98..100: mod_base = OTHER; note = 2'-O-methyl ribonucleotide
  modified_base 1..4: mod_base = OTHER; note = phosphorothioate linkage
  modified_base 97..100: mod_base = OTHER; note = phosphorothioate linkage
  misc_feature 1: note = RNA
  misc_feature 3..7: note = DNA
  misc_feature 8..100: note = RNA

SEQ ID NO: 82 - DNA, 100 bp, synthetic construct; identical to SEQ ID NO: 73
  source 1..100: mol_type = other DNA
  modified_base 1..2: mod_base = OTHER; note = 2'-O-methyl ribonucleotide
  modified_base 21: mod_base = OTHER; note = 2'-O-methyl ribonucleotide
  modified_base 28..32: mod_base = OTHER; note = 2'-O-methyl ribonucleotide
  modified_base 34..42: mod_base = OTHER; note = 2'-O-methyl ribonucleotide
  modified_base 46: mod_base = OTHER; note = 2'-O-methyl ribonucleotide
  modified_base 48: mod_base = OTHER; note = 2'-O-methyl ribonucleotide
  modified_base 50: mod_base = OTHER; note = 2'-O-methyl ribonucleotide
  modified_base 52..57: mod_base = OTHER; note = 2'-O-methyl ribonucleotide
  modified_base 60..61: mod_base = OTHER; note = 2'-O-methyl ribonucleotide
  modified_base 66..67: mod_base = OTHER; note = 2'-O-methyl ribonucleotide
  modified_base 70..72: mod_base = OTHER; note = 2'-O-methyl ribonucleotide
  modified_base 74..81: mod_base = OTHER; note = 2'-O-methyl ribonucleotide
  modified_base 83..100: mod_base = OTHER; note = 2'-O-methyl ribonucleotide
  modified_base 1..4: mod_base = OTHER; note = phosphorothioate linkage
  modified_base 97..100: mod_base = OTHER; note = phosphorothioate linkage
  misc_feature 1..2: note = RNA
  misc_feature 3..7: note = DNA
  misc_feature 8..100: note = RNA

SEQ ID NO: 83 - DNA, 100 bp, synthetic construct; identical to SEQ ID NO: 72
  source 1..100: mol_type = other DNA
  modified_base 3..4: mod_base = OTHER; note = 2'-O-methyl ribonucleotide
  modified_base 13: mod_base = OTHER; note = 2'-O-methyl ribonucleotide
  modified_base 98..100: mod_base = OTHER; note = 2'-O-methyl ribonucleotide
  modified_base 1..4: mod_base = OTHER; note = phosphorothioate linkage
  modified_base 97..100: mod_base = OTHER; note = phosphorothioate linkage
  misc_feature 1..2: note = RNA
  misc_feature 3..4: note = RNA
  misc_feature 5..11: note = DNA
  misc_feature 12..13: note = RNA
  misc_feature 14: note = DNA
  misc_feature 15: note = RNA
  misc_feature 16..18: note = DNA
  misc_feature 19..100: note = RNA

SEQ ID NO: 84 - DNA, 100 bp, synthetic construct; identical to SEQ ID NO: 72
  source 1..100: mol_type = other DNA
  modified_base 3..4: mod_base = OTHER; note = 2'-O-methyl ribonucleotide
  modified_base 21: mod_base = OTHER; note = 2'-O-methyl ribonucleotide
  modified_base 28..32: mod_base = OTHER; note = 2'-O-methyl ribonucleotide
  modified_base 34..42: mod_base = OTHER; note = 2'-O-methyl ribonucleotide
  modified_base 46: mod_base = OTHER; note = 2'-O-methyl ribonucleotide
  modified_base 48: mod_base = OTHER; note = 2'-O-methyl ribonucleotide
  modified_base 50: mod_base = OTHER; note = 2'-O-methyl ribonucleotide
  modified_base 52..57: mod_base = OTHER; note = 2'-O-methyl ribonucleotide
  modified_base 60..61: mod_base = OTHER; note = 2'-O-methyl ribonucleotide
  modified_base 66..67: mod_base = OTHER; note = 2'-O-methyl ribonucleotide
  modified_base 70..72: mod_base = OTHER; note = 2'-O-methyl ribonucleotide
  modified_base 74..81: mod_base = OTHER; note = 2'-O-methyl ribonucleotide
  modified_base 83..100: mod_base = OTHER; note = 2'-O-methyl ribonucleotide
  modified_base 1..4: mod_base = OTHER; note = phosphorothioate linkage
  modified_base 97..100: mod_base = OTHER; note = phosphorothioate linkage
  misc_feature 1..2: note = DNA
  misc_feature 3..4: note = RNA
  misc_feature 5..11: note = DNA
  misc_feature 12..13: note = RNA
  misc_feature 14: note = DNA
  misc_feature 15: note = RNA
  misc_feature 16..18: note = DNA
  misc_feature 19..100: note = RNA

SEQ ID NO: 85 - DNA, 100 bp, synthetic construct; identical to SEQ ID NO: 73
  source 1..100: mol_type = other DNA
  modified_base 1: mod_base = OTHER; note = 2'-O-methyl ribonucleotide
  modified_base 3..4: mod_base = OTHER; note = 2'-O-methyl ribonucleotide
  modified_base 13: mod_base = OTHER; note = 2'-O-methyl ribonucleotide
  modified_base 21: mod_base = OTHER; note = 2'-O-methyl ribonucleotide
  modified_base 28..32: mod_base = OTHER; note = 2'-O-methyl ribonucleotide
  modified_base 34..42: mod_base = OTHER; note = 2'-O-methyl ribonucleotide
  modified_base 46: mod_base = OTHER; note = 2'-O-methyl ribonucleotide
  modified_base 48: mod_base = OTHER; note = 2'-O-methyl ribonucleotide
  modified_base 50: mod_base = OTHER; note = 2'-O-methyl ribonucleotide
  modified_base 52..57: mod_base = OTHER; note = 2'-O-methyl ribonucleotide
  modified_base 60..61: mod_base = OTHER; note = 2'-O-methyl ribonucleotide
  modified_base 66..67: mod_base = OTHER; note = 2'-O-methyl ribonucleotide
  modified_base 70..72: mod_base = OTHER; note = 2'-O-methyl ribonucleotide
  modified_base 74..81: mod_base = OTHER; note = 2'-O-methyl ribonucleotide
  modified_base 83..100: mod_base = OTHER; note = 2'-O-methyl ribonucleotide
  modified_base 1..4: mod_base = OTHER; note = phosphorothioate linkage
  modified_base 97..100: mod_base = OTHER; note = phosphorothioate linkage
  misc_feature 1: note = RNA
  misc_feature 2: note = DNA
  misc_feature 3..4: note = RNA
  misc_feature 5..11: note = DNA
  misc_feature 12..13: note = RNA
  misc_feature 14: note = DNA
  misc_feature 15: note = RNA
  misc_feature 16..18: note = DNA
  misc_feature 19..100: note = RNA

SEQ ID NO: 86 - DNA, 100 bp, synthetic construct; identical to SEQ ID NO: 72
  source 1..100: mol_type = other DNA
  modified_base 1: mod_base = OTHER; note = 2'-O-methyl ribonucleotide
  modified_base 98..100: mod_base = OTHER; note = 2'-O-methyl ribonucleotide
  modified_base 1..4: mod_base = OTHER; note = phosphorothioate linkage
  modified_base 97..100: mod_base = OTHER; note = phosphorothioate linkage
  misc_feature 1: note = RNA
  misc_feature 2..10: note = DNA
  misc_feature 11..100: note = RNA

SEQ ID NO: 87 - DNA, 100 bp, synthetic construct; identical to SEQ ID NO: 73
  source 1..100: mol_type = other DNA
  modified_base 1: mod_base = OTHER; note = 2'-O-methyl ribonucleotide
  modified_base 98..100: mod_base = OTHER; note = 2'-O-methyl ribonucleotide
  modified_base 1..4: mod_base = OTHER; note = phosphorothioate linkage
  modified_base 97..100: mod_base = OTHER; note = phosphorothioate linkage
  misc_feature 1: note = RNA
  misc_feature 2..10: note = DNA
  misc_feature 11..100: note = RNA

SEQ ID NO: 88 - DNA, 100 bp, synthetic construct; identical to SEQ ID NO: 73
  source 1..100: mol_type = other DNA
  modified_base 1: mod_base = OTHER; note = 2'-O-methyl ribonucleotide
  modified_base 21: mod_base = OTHER; note = 2'-O-methyl ribonucleotide
  modified_base 28..32: mod_base = OTHER; note = 2'-O-methyl ribonucleotide
  modified_base 34..42: mod_base = OTHER; note = 2'-O-methyl ribonucleotide
  modified_base 46: mod_base = OTHER; note = 2'-O-methyl ribonucleotide
  modified_base 48: mod_base = OTHER; note = 2'-O-methyl ribonucleotide
  modified_base 50: mod_base = OTHER; note = 2'-O-methyl ribonucleotide
  modified_base 52..57: mod_base = OTHER; note = 2'-O-methyl ribonucleotide
  modified_base 60..61: mod_base = OTHER; note = 2'-O-methyl ribonucleotide
  modified_base 66..67: mod_base = OTHER; note = 2'-O-methyl ribonucleotide
  modified_base 70..72: mod_base = OTHER; note = 2'-O-methyl ribonucleotide
  modified_base 74..81: mod_base = OTHER; note = 2'-O-methyl ribonucleotide
  modified_base 83..100: mod_base = OTHER; note = 2'-O-methyl ribonucleotide
  modified_base 1..4: mod_base = OTHER; note = phosphorothioate linkage
  modified_base 97..100: mod_base = OTHER; note = phosphorothioate linkage
  misc_feature 1: note = RNA
  misc_feature 2..10: note = DNA
  misc_feature 11..100: note = RNA

SEQ ID NO: 89 - DNA, 100 bp, synthetic construct; identical to SEQ ID NO: 72
  source 1..100: mol_type = other DNA
  modified_base 1..2: mod_base = OTHER; note = 2'-O-methyl ribonucleotide
  modified_base 98..100: mod_base = OTHER; note = 2'-O-methyl ribonucleotide
  modified_base 1..4: mod_base = OTHER; note = phosphorothioate linkage
  modified_base 97..100: mod_base = OTHER; note = phosphorothioate linkage
  misc_feature 1..2: note = RNA
  misc_feature 3..6: note = DNA
  misc_feature 7: note = RNA
  misc_feature 8: note = DNA
  misc_feature 9: note = RNA
  misc_feature 10: note = DNA
  misc_feature 11: note = RNA
  misc_feature 12: note = DNA
  misc_feature 13: note = RNA
  misc_feature 14: note = DNA
  misc_feature 15: note = RNA
  misc_feature 16: note = DNA
  misc_feature 17: note = RNA
  misc_feature 18: note = DNA
  misc_feature 19: note = RNA
  misc_feature 20: note = DNA
  misc_feature 21..100: note = RNA

SEQ ID NO: 90 - DNA, 100 bp, synthetic construct; identical to SEQ ID NO: 72
  source 1..100: mol_type = other DNA
  modified_base 1..2: mod_base = OTHER; note = 2'-O-methyl ribonucleotide
  modified_base 21: mod_base = OTHER; note = 2'-O-methyl ribonucleotide
  modified_base 21: mod_base = OTHER; note = 2'-O-methyl ribonucleotide
  modified_base 28..32: mod_base = OTHER; note = 2'-O-methyl ribonucleotide
  modified_base 34..42: mod_base = OTHER; note = 2'-O-methyl ribonucleotide
  modified_base 46: mod_base = OTHER; note = 2'-O-methyl ribonucleotide
  modified_base 48: mod_base = OTHER; note = 2'-O-methyl ribonucleotide
  modified_base 50: mod_base = OTHER; note = 2'-O-methyl ribonucleotide
  modified_base 52..57: mod_base = OTHER; note = 2'-O-methyl ribonucleotide
  modified_base 60..61: mod_base = OTHER; note = 2'-O-methyl ribonucleotide
  modified_base 66..67: mod_base = OTHER; note = 2'-O-methyl ribonucleotide
  modified_base 70..72: mod_base = OTHER; note = 2'-O-methyl ribonucleotide
  modified_base 74..81: mod_base = OTHER; note = 2'-O-methyl ribonucleotide
  modified_base 83..100: mod_base = OTHER; note = 2'-O-methyl ribonucleotide
  modified_base 1..4: mod_base = OTHER; note = phosphorothioate linkage
  modified_base 97..100: mod_base = OTHER; note = phosphorothioate linkage
  misc_feature 1..2: note = RNA
  misc_feature 3..6: note = DNA
  misc_feature 7: note = RNA
  misc_feature 8: note = DNA
  misc_feature 9: note = RNA
  misc_feature 10: note = DNA
  misc_feature 11: note = RNA
  misc_feature 12: note = DNA
  misc_feature 13: note = RNA
  misc_feature 14: note = DNA
  misc_feature 15: note = RNA
  misc_feature 16: note = DNA
  misc_feature 17: note = RNA
  misc_feature 18: note = DNA
  misc_feature 19: note = RNA
  misc_feature 20: note = DNA
  misc_feature 21: note = RNA

SEQ ID NO: 91 - DNA, 100 bp, synthetic construct; identical to SEQ ID NO: 73
  source 1..100: mol_type = other DNA
  modified_base 1..2: mod_base = OTHER; note = 2'-O-methyl ribonucleotide
  modified_base 98..100: mod_base = OTHER; note = 2'-O-methyl ribonucleotide
  modified_base 1..4: mod_base = OTHER; note = phosphorothioate linkage
  modified_base 97..100: mod_base = OTHER; note = phosphorothioate linkage
  misc_feature 1..2: note = RNA
  misc_feature 3..6: note = DNA
  misc_feature 7: note = RNA
  misc_feature 8: note = DNA
  misc_feature 9: note = RNA
  misc_feature 10: note = DNA
  misc_feature 11: note = RNA
  misc_feature 12: note = DNA
  misc_feature 13: note = RNA
  misc_feature 14: note = DNA
  misc_feature 15: note = RNA
  misc_feature 16: note = DNA
  misc_feature 17: note = RNA
  misc_feature 18: note = DNA
  misc_feature 19: note = RNA
  misc_feature 20: note = DNA
  misc_feature 21..100: note = RNA

SEQ ID NO: 92 - DNA, 100 bp, synthetic construct; identical to SEQ ID NO: 73
  source 1..100: mol_type = other DNA
  modified_base 1..2: mod_base = OTHER; note = 2'-O-methyl ribonucleotide
  modified_base 21: mod_base = OTHER; note = 2'-O-methyl ribonucleotide
  modified_base 28..32: mod_base = OTHER; note = 2'-O-methyl ribonucleotide
  modified_base 34..42: mod_base = OTHER; note = 2'-O-methyl ribonucleotide
  modified_base 46: mod_base = OTHER; note = 2'-O-methyl ribonucleotide
  modified_base 48: mod_base = OTHER; note = 2'-O-methyl ribonucleotide
  modified_base 50: mod_base = OTHER; note = 2'-O-methyl ribonucleotide
  modified_base 52..57: mod_base = OTHER; note = 2'-O-methyl ribonucleotide
  modified_base 60..61: mod_base = OTHER; note = 2'-O-methyl ribonucleotide
  modified_base 66..67: mod_base = OTHER; note = 2'-O-methyl ribonucleotide
  modified_base 70..72: mod_base = OTHER; note = 2'-O-methyl ribonucleotide
  modified_base 74..81: mod_base = OTHER; note = 2'-O-methyl ribonucleotide
  modified_base 83..100: mod_base = OTHER; note = 2'-O-methyl ribonucleotide
  modified_base 1..4: mod_base = OTHER; note = phosphorothioate linkage
  modified_base 97..100: mod_base = OTHER; note = phosphorothioate linkage
  misc_feature 1..2: note = RNA
  misc_feature 3..6: note = DNA
  misc_feature 7: note = RNA
  misc_feature 8: note = DNA
  misc_feature 9: note = RNA
  misc_feature 10: note = DNA
  misc_feature 11: note = RNA
  misc_feature 12: note = DNA
  misc_feature 13: note = RNA
  misc_feature 14: note = DNA
  misc_feature 15: note = RNA
  misc_feature 16: note = DNA
  misc_feature 17: note = RNA
  misc_feature 18: note = DNA
  misc_feature 19: note = RNA
  misc_feature 20: note = DNA
  misc_feature 21..100: note = RNA

SEQ ID NO: 93 - DNA, 100 bp, synthetic construct; identical to SEQ ID NO: 72
  source 1..100: mol_type = other DNA
  modified_base 1..2: mod_base = OTHER; note = 2'-O-methyl ribonucleotide
  modified_base 98..100: mod_base = OTHER; note = 2'-O-methyl ribonucleotide
  modified_base 1..4: mod_base = OTHER; note = phosphorothioate linkage
  modified_base 97..100: mod_base = OTHER; note = phosphorothioate linkage
  misc_feature 1..2: note = RNA
  misc_feature 3..10: note = DNA
  misc_feature 11: note = RNA
  misc_feature 12: note = DNA
  misc_feature 13: note = RNA
  misc_feature 14: note = DNA
  misc_feature 15: note = RNA
  misc_feature 16: note = DNA
  misc_feature 17: note = RNA
  misc_feature 18: note = DNA
  misc_feature 19: note = RNA
  misc_feature 20: note = DNA
  misc_feature 21..100: note = RNA

SEQ ID NO: 94 - DNA, 100 bp, synthetic construct; identical to SEQ ID NO: 72
  source 1..100: mol_type = other DNA
  modified_base 1..2: mod_base = OTHER; note = 2'-O-methyl ribonucleotide
  modified_base 21: mod_base = OTHER; note = 2'-O-methyl ribonucleotide
  modified_base 28..32: mod_base = OTHER; note = 2'-O-methyl ribonucleotide
  modified_base 34..42: mod_base = OTHER; note = 2'-O-methyl ribonucleotide
  modified_base 46: mod_base = OTHER; note = 2'-O-methyl ribonucleotide
  modified_base 48: mod_base = OTHER; note = 2'-O-methyl ribonucleotide
  modified_base 50: mod_base = OTHER; note = 2'-O-methyl ribonucleotide
  modified_base 52..57: mod_base = OTHER; note = 2'-O-methyl ribonucleotide
  modified_base 60..61: mod_base = OTHER; note = 2'-O-methyl ribonucleotide
  modified_base 66..67: mod_base = OTHER; note = 2'-O-methyl ribonucleotide
  modified_base 70..72: mod_base = OTHER; note = 2'-O-methyl ribonucleotide
  modified_base 74..81: mod_base = OTHER; note = 2'-O-methyl ribonucleotide
  modified_base 83..100: mod_base = OTHER; note = 2'-O-methyl ribonucleotide
  modified_base 1..4: mod_base = OTHER; note = phosphorothioate linkage
  modified_base 97..100: mod_base = OTHER; note = phosphorothioate linkage
  misc_feature 1..2: note = RNA
  misc_feature 3..10: note = DNA
  misc_feature 11: note = RNA
  misc_feature 12: note = DNA
  misc_feature 13: note = RNA
  misc_feature 14: note = DNA
  misc_feature 15: note = RNA
  misc_feature 16: note = DNA
  misc_feature 17: note = RNA
  misc_feature 18: note = DNA
  misc_feature 19: note = RNA
  misc_feature 20: note = DNA
  misc_feature 21..100: note = RNA

SEQ ID NO: 95 - DNA, 100 bp, synthetic construct; identical to SEQ ID NO: 73
  source 1..100: mol_type = other DNA
  modified_base 1..2: mod_base = OTHER; note = 2'-O-methyl ribonucleotide
  modified_base 21: mod_base = OTHER; note = 2'-O-methyl ribonucleotide
  modified_base 28..32: mod_base = OTHER; note = 2'-O-methyl ribonucleotide
  modified_base 34..42: mod_base = OTHER; note = 2'-O-methyl ribonucleotide
  modified_base 46: mod_base = OTHER; note = 2'-O-methyl ribonucleotide
  modified_base 48: mod_base = OTHER; note = 2'-O-methyl ribonucleotide
  modified_base 50: mod_base = OTHER; note = 2'-O-methyl ribonucleotide
  modified_base 52..57: mod_base = OTHER; note = 2'-O-methyl ribonucleotide
  modified_base 60..61: mod_base = OTHER; note = 2'-O-methyl ribonucleotide
  modified_base 66..67: mod_base = OTHER; note = 2'-O-methyl ribonucleotide
  modified_base 70..72: mod_base = OTHER; note = 2'-O-methyl ribonucleotide
  modified_base 74..81: mod_base = OTHER; note = 2'-O-methyl ribonucleotide
  modified_base 83..100: mod_base = OTHER; note = 2'-O-methyl ribonucleotide
  modified_base 1..4: mod_base = OTHER; note = phosphorothioate linkage
  modified_base 97..100: mod_base = OTHER; note = phosphorothioate linkage
  misc_feature 1..2: note = RNA
  misc_feature 3..10: note = DNA
  misc_feature 11: note = RNA
  misc_feature 12: note = DNA
  misc_feature 13: note = RNA
  misc_feature 14: note = DNA
  misc_feature 15: note = RNA
  misc_feature 16: note = DNA
  misc_feature 17: note = RNA
  misc_feature 18: note = DNA
  misc_feature 19: note = RNA
  misc_feature 20: note = DNA
  misc_feature 21..100: note = RNA

SEQ ID NO: 96 - DNA, 100 bp, synthetic construct; identical to SEQ ID NO: 72
  source 1..100: mol_type = other DNA
  modified_base 1..4: mod_base = OTHER; note = phosphorothioate linkage
  modified_base 97..100: mod_base = OTHER; note = phosphorothioate linkage
  misc_feature 1..6: note = DNA
  misc_feature 7: note = RNA
  misc_feature 8..11: note = DNA
  misc_feature 12..100: note = RNA

SEQ ID NO: 97 - DNA, 100 bp, synthetic construct; identical to SEQ ID NO: 73
  source 1..100: mol_type = other DNA
  modified_base 21: mod_base = OTHER; note = 2'-O-methyl ribonucleotide
  modified_base 28..32: mod_base = OTHER; note = 2'-O-methyl ribonucleotide
  modified_base 34..42: mod_base = OTHER; note = 2'-O-methyl ribonucleotide
  modified_base 46: mod_base = OTHER; note = 2'-O-methyl ribonucleotide
  modified_base 48: mod_base = OTHER; note = 2'-O-methyl ribonucleotide
  modified_base 50: mod_base = OTHER; note = 2'-O-methyl ribonucleotide
  modified_base 52..57: mod_base = OTHER; note = 2'-O-methyl ribonucleotide
  modified_base 60..61: mod_base = OTHER; note = 2'-O-methyl ribonucleotide
  modified_base 66..67: mod_base = OTHER; note = 2'-O-methyl ribonucleotide
  modified_base 70..72: mod_base = OTHER; note = 2'-O-methyl ribonucleotide
  modified_base 74..81: mod_base = OTHER; note = 2'-O-methyl ribonucleotide
  modified_base 83..100: mod_base = OTHER; note = 2'-O-methyl ribonucleotide
  modified_base 1..4: mod_base = OTHER; note = phosphorothioate linkage
  modified_base 97..100: mod_base = OTHER; note = phosphorothioate linkage
  misc_feature 1..6: note = DNA
  misc_feature 7: note = RNA
  misc_feature 8..11: note = DNA
  misc_feature 12..100: note = RNA

SEQ ID NO: 98 - DNA, 100 bp, synthetic construct; identical to SEQ ID NO: 72
  source 1..100: mol_type = other DNA
  modified_base 1: mod_base = OTHER; note = 2'-O-methyl ribonucleotide
  modified_base 1..4: mod_base = OTHER; note = phosphorothioate linkage
  modified_base 97..100: mod_base = OTHER; note = phosphorothioate linkage
  misc_feature 1: note = RNA
  misc_feature 2..10: note = DNA
  misc_feature 11: note = RNA
  misc_feature 12: note = DNA
  misc_feature 13: note = RNA
  misc_feature 14: note = DNA
  misc_feature 15: note = RNA
  misc_feature 16: note = DNA
  misc_feature 17: note = RNA
  misc_feature 18: note = DNA
  misc_feature 19: note = RNA
  misc_feature 20: note = DNA
  misc_feature 21..100: note = RNA

SEQ ID NO: 99 - DNA, 100 bp, synthetic construct; identical to SEQ ID NO: 73
  source 1..100: mol_type = other DNA
  modified_base 1: mod_base = OTHER; note = 2'-O-methyl ribonucleotide
  modified_base 21: mod_base = OTHER; note = 2'-O-methyl ribonucleotide
  modified_base 28..32: mod_base = OTHER; note = 2'-O-methyl ribonucleotide
  modified_base 34..42: mod_base = OTHER; note = 2'-O-methyl ribonucleotide
  modified_base 46: mod_base = OTHER; note = 2'-O-methyl ribonucleotide
  modified_base 48: mod_base = OTHER; note = 2'-O-methyl ribonucleotide
  modified_base 50: mod_base = OTHER; note = 2'-O-methyl ribonucleotide
  modified_base 52..57: mod_base = OTHER; note = 2'-O-methyl ribonucleotide
  modified_base 60..61: mod_base = OTHER; note = 2'-O-methyl ribonucleotide
  modified_base 66..67: mod_base = OTHER; note = 2'-O-methyl ribonucleotide
  modified_base 70..72: mod_base = OTHER; note = 2'-O-methyl ribonucleotide
  modified_base 74..81: mod_base = OTHER; note = 2'-O-methyl ribonucleotide
  modified_base 83..100: mod_base = OTHER; note = 2'-O-methyl ribonucleotide
  modified_base 1..4: mod_base = OTHER; note = phosphorothioate linkage
  modified_base 97..100: mod_base = OTHER; note = phosphorothioate linkage
  misc_feature 1: note = RNA
  misc_feature 2..10: note = DNA
  misc_feature 11: note = RNA
  misc_feature 12: note = DNA
  misc_feature 13: note = RNA
  misc_feature 14: note = DNA
  misc_feature 15: note = RNA
  misc_feature 16: note = DNA
  misc_feature 17: note = RNA
  misc_feature 18: note = DNA
  misc_feature 19: note = RNA
  misc_feature 20: note = DNA
  misc_feature 21..100: note = RNA

SEQ ID NO: 100 - DNA, 100 bp, synthetic construct; identical to SEQ ID NO: 72
  source 1..100: mol_type = other DNA
  modified_base 1..2: mod_base = OTHER; note = 2'-O-methyl ribonucleotide
  modified_base 98..100: mod_base = OTHER; note = 2'-O-methyl ribonucleotide
  modified_base 1..4: mod_base = OTHER; note = phosphorothioate linkage
  modified_base 97..100: mod_base = OTHER; note = phosphorothioate linkage
  misc_feature 1..2: note = RNA
  misc_feature 3..8: note = DNA
  misc_feature 9..100: note = RNA

SEQ ID NO: 101 - DNA, 100 bp, synthetic construct; identical to SEQ ID NO: 72
  source 1..100: mol_type = other DNA
  modified_base 1..2: mod_base = OTHER; note = 2'-O-methyl ribonucleotide
  modified_base 21: mod_base = OTHER; note = 2'-O-methyl ribonucleotide
  modified_base 28..32: mod_base = OTHER; note = 2'-O-methyl ribonucleotide
  modified_base 34..42: mod_base = OTHER; note = 2'-O-methyl ribonucleotide
  modified_base 46: mod_base = OTHER; note = 2'-O-methyl ribonucleotide
  modified_base 48: mod_base = OTHER; note = 2'-O-methyl ribonucleotide
  modified_base 50: mod_base = OTHER; note = 2'-O-methyl ribonucleotide
  modified_base 52..57: mod_base = OTHER; note = 2'-O-methyl ribonucleotide
  modified_base 60..61: mod_base = OTHER; note = 2'-O-methyl ribonucleotide
  modified_base 66..67: mod_base = OTHER; note = 2'-O-methyl ribonucleotide
  modified_base 70..72: mod_base = OTHER; note = 2'-O-methyl ribonucleotide
  modified_base 74..81: mod_base = OTHER; note = 2'-O-methyl ribonucleotide
  modified_base 83..100: mod_base = OTHER; note = 2'-O-methyl ribonucleotide
  modified_base 1..4: mod_base = OTHER; note = phosphorothioate linkage
  modified_base 97..100: mod_base = OTHER; note = phosphorothioate linkage
  misc_feature 1..2: note = RNA
  misc_feature 3..8: note = DNA
  misc_feature 9..100: note = RNA

SEQ ID NO: 102 - DNA, 100 bp, synthetic construct; identical to SEQ ID NO: 72
  source 1..100: mol_type = other DNA
  modified_base 1..3: mod_base = OTHER; note = 2'-O-methyl ribonucleotide
  modified_base 98..100: mod_base = OTHER; note = 2'-O-methyl ribonucleotide
  modified_base 1..4: mod_base = OTHER; note = phosphorothioate linkage
  modified_base 97..100: mod_base = OTHER; note = phosphorothioate linkage
  misc_feature 1..3: note = RNA
  misc_feature 4..7: note = DNA
  misc_feature 8: note = RNA
  misc_feature 9..10: note = DNA
  misc_feature 11..12: note = RNA
  misc_feature 13..14: note = DNA
  misc_feature 15..100: note = RNA

SEQ ID NO: 103 - DNA, 100 bp, synthetic construct; identical to SEQ ID NO: 72
  source 1..100: mol_type = other DNA
  modified_base 1..3: mod_base = OTHER; note = 2'-O-methyl ribonucleotide
  modified_base 21: mod_base = OTHER; note = 2'-O-methyl ribonucleotide
  modified_base 28..32: mod_base = OTHER; note = 2'-O-methyl ribonucleotide
  modified_base 34..42: mod_base = OTHER; note = 2'-O-methyl ribonucleotide
  modified_base 46: mod_base = OTHER; note = 2'-O-methyl ribonucleotide
  modified_base 48: mod_base = OTHER; note = 2'-O-methyl ribonucleotide
  modified_base 50: mod_base = OTHER; note = 2'-O-methyl ribonucleotide
  modified_base 52..57: mod_base = OTHER; note = 2'-O-methyl ribonucleotide
  modified_base 60..61: mod_base = OTHER; note = 2'-O-methyl ribonucleotide
  modified_base 66..67: mod_base = OTHER; note = 2'-O-methyl ribonucleotide
  modified_base 70..72: mod_base = OTHER; note = 2'-O-methyl ribonucleotide
  modified_base 74..81: mod_base = OTHER; note = 2'-O-methyl ribonucleotide
  modified_base 83..100: mod_base = OTHER; note = 2'-O-methyl ribonucleotide
  modified_base 1..4: mod_base = OTHER; note = phosphorothioate linkage
  modified_base 97..100: mod_base = OTHER; note = phosphorothioate linkage
  misc_feature 1..3: note = RNA
  misc_feature 4..7: note = DNA
  misc_feature 8: note = RNA
  misc_feature 9..10: note = DNA
  misc_feature 11..12: note = RNA
  misc_feature 13..14: note = DNA
  misc_feature 15..100: note = RNA

SEQ ID NO: 104 - DNA, 100 bp, synthetic construct; identical to SEQ ID NO: 73
  source 1..100: mol_type = other DNA
  modified_base 1..3: mod_base = OTHER; note = 2'-O-methyl ribonucleotide
  modified_base 98..100: mod_base = OTHER; note = 2'-O-methyl ribonucleotide
  modified_base 1..4: mod_base = OTHER; note = phosphorothioate linkage
  modified_base 97..100: mod_base = OTHER; note = phosphorothioate linkage
  misc_feature 1..3: note = RNA
  misc_feature 4..7: note = DNA
  misc_feature 8: note = RNA
  misc_feature 9..10: note = DNA
  misc_feature 11..12: note = RNA
  misc_feature 13..14: note = DNA
  misc_feature 15..100: note = RNA

SEQ ID NO: 105 - DNA, 100 bp, synthetic construct; identical to SEQ ID NO: 73
  source 1..100: mol_type = other DNA
  modified_base 1..3: mod_base = OTHER; note = 2'-O-methyl ribonucleotide
  modified_base 21: mod_base = OTHER; note = 2'-O-methyl ribonucleotide
  modified_base 28..32: mod_base = OTHER; note = 2'-O-methyl ribonucleotide
  modified_base 34..42: mod_base = OTHER; note = 2'-O-methyl ribonucleotide
  modified_base 46: mod_base = OTHER; note = 2'-O-methyl ribonucleotide
  modified_base 48: mod_base = OTHER; note = 2'-O-methyl ribonucleotide
  modified_base 50: mod_base = OTHER; note = 2'-O-methyl ribonucleotide
  modified_base 52..57: mod_base = OTHER; note = 2'-O-methyl ribonucleotide
  modified_base 60..61: mod_base = OTHER; note = 2'-O-methyl ribonucleotide
  modified_base 66..67: mod_base = OTHER; note = 2'-O-methyl ribonucleotide
  modified_base 70..72: mod_base = OTHER; note = 2'-O-methyl ribonucleotide
  modified_base 74..81: mod_base = OTHER; note = 2'-O-methyl ribonucleotide
  modified_base 83..100: mod_base = OTHER; note = 2'-O-methyl ribonucleotide
  modified_base 1..4: mod_base = OTHER; note = phosphorothioate linkage
  modified_base 97..100: mod_base = OTHER; note = phosphorothioate linkage
  misc_feature 1..3: note = RNA
  misc_feature 4..7: note = DNA
  misc_feature 8: note = RNA
  misc_feature 9..10: note = DNA
  misc_feature 11..12: note = RNA
  misc_feature 13..14: note = DNA
  misc_feature 15..100: note = RNA

SEQ ID NO: 106 - DNA, 100 bp, synthetic construct; identical to SEQ ID NO: 72
  source 1..100: mol_type = other DNA
  modified_base 1..2: mod_base = OTHER; note = 2'-O-methyl ribonucleotide
  modified_base 98..100: mod_base = OTHER; note = 2'-O-methyl ribonucleotide
  modified_base 1..4: mod_base = OTHER; note = phosphorothioate linkage
  modified_base 97..100: mod_base = OTHER; note = phosphorothioate linkage
  misc_feature 1..2: note = RNA
  misc_feature 3..4: note = DNA
  misc_feature 5: note = RNA
  misc_feature 6..7: note = DNA
  misc_feature 8..100: note = RNA

SEQ ID NO: 107 - DNA, 100 bp, synthetic construct; identical to SEQ ID NO: 72
  source 1..100: mol_type = other DNA
  modified_base 1..2: mod_base = OTHER; note = 2'-O-methyl ribonucleotide
  modified_base 21: mod_base = OTHER; note = 2'-O-methyl ribonucleotide
  modified_base 28..32: mod_base = OTHER; note = 2'-O-methyl ribonucleotide
  modified_base 34..42: mod_base = OTHER; note = 2'-O-methyl ribonucleotide
  modified_base 46: mod_base = OTHER; note = 2'-O-methyl ribonucleotide
  modified_base 48: mod_base = OTHER; note = 2'-O-methyl ribonucleotide
  modified_base 50: mod_base = OTHER; note = 2'-O-methyl ribonucleotide
  modified_base 52..57: mod_base = OTHER; note = 2'-O-methyl ribonucleotide
  modified_base 60..61: mod_base = OTHER; note = 2'-O-methyl ribonucleotide
  modified_base 66..67: mod_base = OTHER; note = 2'-O-methyl ribonucleotide
  modified_base 70..72: mod_base = OTHER; note = 2'-O-methyl ribonucleotide
  modified_base 74..81: mod_base = OTHER; note = 2'-O-methyl ribonucleotide
  modified_base 83..100: mod_base = OTHER; note = 2'-O-methyl ribonucleotide
  modified_base 1..4: mod_base = OTHER; note = phosphorothioate linkage
  modified_base 97..100: mod_base = OTHER; note = phosphorothioate linkage
  misc_feature 1..2: note = RNA
  misc_feature 3..4: note = DNA
  misc_feature 5: note = RNA
  misc_feature 6..7: note = DNA
  misc_feature 8..100: note = RNA

SEQ ID NO: 108 - DNA, 100 bp, synthetic construct; identical to SEQ ID NO: 73
  source 1..100: mol_type = other DNA
  modified_base 1..2: mod_base = OTHER; note = 2'-O-methyl ribonucleotide
  modified_base 98..100: mod_base = OTHER; note = 2'-O-methyl ribonucleotide
  modified_base 1..4: mod_base = OTHER; note = phosphorothioate linkage
  modified_base 97..100: mod_base = OTHER; note = phosphorothioate linkage
  misc_feature 1..2: note = RNA
  misc_feature 3..4: note = DNA
  misc_feature 5: note = RNA
  misc_feature 6..7: note = DNA
  misc_feature 8..100: note = RNA

SEQ ID NO: 109 - DNA, 100 bp, synthetic construct; identical to SEQ ID NO: 73
  source 1..100: mol_type = other DNA
  modified_base 1..2: mod_base = OTHER; note = 2'-O-methyl ribonucleotide
  modified_base 21: mod_base = OTHER; note = 2'-O-methyl ribonucleotide
  modified_base 28..32: mod_base = OTHER; note = 2'-O-methyl ribonucleotide
  modified_base 34..42: mod_base = OTHER; note = 2'-O-methyl ribonucleotide
  modified_base 46: mod_base = OTHER; note = 2'-O-methyl ribonucleotide
  modified_base 48: mod_base = OTHER; note = 2'-O-methyl ribonucleotide
  modified_base 50: mod_base = OTHER; note = 2'-O-methyl ribonucleotide
  modified_base 52..57: mod_base = OTHER; note = 2'-O-methyl ribonucleotide
  modified_base 60..61: mod_base = OTHER; note = 2'-O-methyl ribonucleotide
  modified_base 66..67: mod_base = OTHER; note = 2'-O-methyl ribonucleotide
  modified_base 70..72: mod_base = OTHER; note = 2'-O-methyl ribonucleotide
  modified_base 74..81: mod_base = OTHER; note = 2'-O-methyl ribonucleotide
  modified_base 83..100: mod_base = OTHER; note = 2'-O-methyl ribonucleotide
  modified_base 1..4: mod_base = OTHER; note = phosphorothioate linkage
  modified_base 97..100: mod_base = OTHER; note = phosphorothioate linkage
  misc_feature 1..2: note = RNA
  misc_feature 3..4: note = DNA
  misc_feature 5: note = RNA
  misc_feature 6..7: note = DNA
  misc_feature 8..100: note = RNA

SEQ ID NO: 110 - DNA, 100 bp, synthetic construct; identical to SEQ ID NO: 72
  source 1..100: mol_type = other DNA
  modified_base 1..2: mod_base = OTHER; note = 2'-O-methyl ribonucleotide
  modified_base 98..100: mod_base = OTHER; note = 2'-O-methyl ribonucleotide
  modified_base 1..4: mod_base = OTHER; note = phosphorothioate linkage
  modified_base 97..100: mod_base = OTHER; note = phosphorothioate linkage
  misc_feature 1..2: note = RNA
  misc_feature 3..4: note = DNA
  misc_feature 5: note = RNA
  misc_feature 6..7: note = DNA
  misc_feature 8..100: note = RNA

SEQ ID NO: 111 - DNA, 100 bp, synthetic construct; identical to SEQ ID NO: 72
  source 1..100: mol_type = other DNA
  modified_base 1..2: mod_base = OTHER; note = 2'-O-methyl ribonucleotide
  modified_base 21: mod_base = OTHER; note = 2'-O-methyl ribonucleotide
  modified_base 28..32: mod_base = OTHER; note = 2'-O-methyl ribonucleotide
  modified_base 34..42: mod_base = OTHER; note = 2'-O-methyl ribonucleotide
  modified_base 46: mod_base = OTHER; note = 2'-O-methyl ribonucleotide
  modified_base 48: mod_base = OTHER; note = 2'-O-methyl ribonucleotide
  modified_base 50: mod_base = OTHER; note = 2'-O-methyl ribonucleotide
  modified_base 52..57: mod_base = OTHER; note = 2'-O-methyl ribonucleotide
  modified_base 60..61: mod_base = OTHER; note = 2'-O-methyl ribonucleotide
  modified_base 66..67: mod_base = OTHER; note = 2'-O-methyl ribonucleotide
  modified_base 70..72: mod_base = OTHER; note = 2'-O-methyl ribonucleotide
  modified_base 74..81: mod_base = OTHER; note = 2'-O-methyl ribonucleotide
  modified_base 83..100: mod_base = OTHER; note = 2'-O-methyl ribonucleotide
  modified_base 1..4: mod_base = OTHER; note = phosphorothioate linkage
  modified_base 97..100: mod_base = OTHER; note = phosphorothioate linkage
  misc_feature 1..2: note = RNA
  misc_feature 3..4: note = DNA
  misc_feature 5: note = RNA
  misc_feature 6..8: note = DNA
  misc_feature 9..100: note = RNA

SEQ ID NO: 112 - DNA, 100 bp, synthetic construct; identical to SEQ ID NO: 73
  source 1..100: mol_type = other DNA
  modified_base 1..2: mod_base = OTHER; note = 2'-O-methyl ribonucleotide
  modified_base 98..100: mod_base = OTHER; note = 2'-O-methyl ribonucleotide
  modified_base 1..4: mod_base = OTHER; note = phosphorothioate linkage
  modified_base 97..100: mod_base = OTHER; note = phosphorothioate linkage
  misc_feature 1..2: note = RNA
  misc_feature 3..4: note = DNA
  misc_feature 5: note = RNA
  misc_feature 6..8: note = DNA
  misc_feature 9..100: note = RNA

SEQ ID NO: 113 - DNA, 100 bp, synthetic construct; identical to SEQ ID NO: 73
  source 1..100: mol_type = other DNA
  modified_base 1..2: mod_base = OTHER; note = 2'-O-methyl ribonucleotide
  modified_base 21: mod_base = OTHER; note = 2'-O-methyl ribonucleotide
  modified_base 28..32: mod_base = OTHER; note = 2'-O-methyl ribonucleotide
  modified_base 34..42: mod_base = OTHER; note = 2'-O-methyl ribonucleotide
  modified_base 46: mod_base = OTHER; note = 2'-O-methyl ribonucleotide
  modified_base 48: mod_base = OTHER; note = 2'-O-methyl ribonucleotide
  modified_base 50: mod_base = OTHER; note = 2'-O-methyl ribonucleotide
  modified_base 52..57: mod_base = OTHER; note = 2'-O-methyl ribonucleotide
  modified_base 60..61: mod_base = OTHER; note = 2'-O-methyl ribonucleotide
  modified_base 66..67: mod_base = OTHER; note = 2'-O-methyl ribonucleotide
  modified_base 70..72: mod_base = OTHER; note = 2'-O-methyl ribonucleotide
  modified_base 74..81: mod_base = OTHER; note = 2'-O-methyl ribonucleotide
  modified_base 83..100: mod_base = OTHER; note = 2'-O-methyl ribonucleotide
  modified_base 1..4: mod_base = OTHER; note = phosphorothioate linkage
  modified_base 97..100: mod_base = OTHER; note = phosphorothioate linkage
  misc_feature 1..2: note = RNA
  misc_feature 3..4: note = DNA
  misc_feature 5: note = RNA
  misc_feature 6..8: note = DNA
  misc_feature 9..100: note = RNA

SEQ ID NO: 114 - DNA, 100 bp, synthetic construct; identical to SEQ ID NO: 72
  source 1..100: mol_type = other DNA
  modified_base 1..3: mod_base = OTHER; note = 2'-O-methyl ribonucleotide
  modified_base 97..100: mod_base = OTHER; note = 2'-O-methyl ribonucleotide
  modified_base 1..4: mod_base = OTHER; note = phosphorothioate linkage
  modified_base 97..100: mod_base = OTHER; note = phosphorothioate linkage
  misc_feature 1..9: note = RNA
  misc_feature 10: note = DNA
  misc_feature 11..12: note = RNA
  misc_feature 13: note = DNA
  misc_feature 14..17: note = RNA
  misc_feature 18: note = DNA
  misc_feature 19..100: note = RNA

SEQ ID NO: 115 - DNA, 100 bp, synthetic construct; identical to SEQ ID NO: 72
  source 1..100: mol_type = other DNA
  modified_base 1..3: mod_base = OTHER; note = 2'-O-methyl ribonucleotide
  modified_base 21: mod_base = OTHER; note = 2'-O-methyl ribonucleotide
  modified_base 28..32: mod_base = OTHER; note = 2'-O-methyl ribonucleotide
  modified_base 34..42: mod_base = OTHER; note = 2'-O-methyl ribonucleotide
  modified_base 46: mod_base = OTHER; note = 2'-O-methyl ribonucleotide
  modified_base 48: mod_base = OTHER; note = 2'-O-methyl ribonucleotide
  modified_base 50: mod_base = OTHER; note = 2'-O-methyl ribonucleotide
  modified_base 52..57: mod_base = OTHER; note = 2'-O-methyl ribonucleotide
  modified_base 60..61: mod_base = OTHER; note = 2'-O-methyl ribonucleotide
  modified_base 66..67: mod_base = OTHER; note = 2'-O-methyl ribonucleotide
  modified_base 70..72: mod_base = OTHER; note = 2'-O-methyl ribonucleotide
  modified_base 74..81: mod_base = OTHER; note = 2'-O-methyl ribonucleotide
  modified_base 83..100: mod_base = OTHER; note = 2'-O-methyl ribonucleotide
  modified_base 1..4: mod_base = OTHER; note = phosphorothioate linkage
  modified_base 97..100: mod_base = OTHER; note = phosphorothioate linkage
  misc_feature 1..9: note = RNA
  misc_feature 10: note = DNA
  misc_feature 11..12: note = RNA
  misc_feature 13: note = DNA
  misc_feature 14..17: note = RNA
  misc_feature 18: note = DNA
  misc_feature 19..100: note = RNA

SEQ ID NO: 116 - DNA, 100 bp, synthetic construct; identical to SEQ ID NO: 72
  source 1..100: mol_type = other DNA
  modified_base 1..3: mod_base = OTHER; note = 2'-O-methyl ribonucleotide
  modified_base 97..100: mod_base = OTHER; note = 2'-O-methyl ribonucleotide
  modified_base 1..4: mod_base = OTHER; note = phosphorothioate linkage
  modified_base 97..100: mod_base = OTHER; note = phosphorothioate linkage
  misc_feature 1..5: note = RNA
  misc_feature 6: note = DNA
  misc_feature 7..15: note = RNA
  misc_feature 16: note = DNA
  misc_feature 17..100: note = RNA

SEQ ID NO: 117 - DNA, 100 bp, synthetic construct; identical to SEQ ID NO: 72
  source 1..100: mol_type = other DNA
  modified_base 1..3: mod_base = OTHER; note = 2'-O-methyl ribonucleotide
  modified_base 21: mod_base = OTHER; note = 2'-O-methyl ribonucleotide
  modified_base 28..32: mod_base = OTHER; note = 2'-O-methyl ribonucleotide
  modified_base 34..42: mod_base = OTHER; note = 2'-O-methyl ribonucleotide
  modified_base 46: mod_base = OTHER; note = 2'-O-methyl ribonucleotide
  modified_base 48: mod_base = OTHER; note = 2'-O-methyl ribonucleotide
  modified_base 50: mod_base = OTHER; note = 2'-O-methyl ribonucleotide
  modified_base 52..57: mod_base = OTHER; note = 2'-O-methyl ribonucleotide
  modified_base 60..61: mod_base = OTHER; note = 2'-O-methyl ribonucleotide
  modified_base 66..67: mod_base = OTHER; note = 2'-O-methyl ribonucleotide
  modified_base 70..72: mod_base = OTHER; note = 2'-O-methyl ribonucleotide
  modified_base 74..81: mod_base = OTHER; note = 2'-O-methyl ribonucleotide
  modified_base 83..100: mod_base = OTHER; note = 2'-O-methyl ribonucleotide
  modified_base 1..4: mod_base = OTHER; note = phosphorothioate linkage
  modified_base 97..100: mod_base = OTHER; note = phosphorothioate linkage
  misc_feature 1..5: note = RNA
  misc_feature 6: note = DNA
  misc_feature 7..15: note = RNA
  misc_feature 16: note = DNA
  misc_feature 17..100: note = RNA

SEQ ID NO: 118 - DNA, 100 bp, synthetic construct; identical to SEQ ID NO: 73
  source 1..100: mol_type = other DNA
  modified_base 1..3: mod_base = OTHER; note = 2'-O-methyl ribonucleotide
  modified_base 97..100: mod_base = OTHER; note = 2'-O-methyl ribonucleotide
  modified_base 1..4: mod_base = OTHER; note = phosphorothioate linkage
  modified_base 97..100: mod_base = OTHER; note = phosphorothioate linkage
  misc_feature 1..5: note = RNA
  misc_feature 6: note = DNA
  misc_feature 6..15: note = RNA
  misc_feature 16: note = DNA
  misc_feature 17..100: note = RNA

SEQ ID NO: 119 - DNA, 100 bp, synthetic construct; identical to SEQ ID NO: 73
  source 1..100: mol_type = other DNA
  modified_base 1..3: mod_base = OTHER; note = 2'-O-methyl ribonucleotide
  modified_base 21: mod_base = OTHER; note = 2'-O-methyl ribonucleotide
  modified_base 28..32: mod_base = OTHER; note = 2'-O-methyl ribonucleotide
  modified_base 34..42: mod_base = OTHER; note = 2'-O-methyl ribonucleotide
  modified_base 46: mod_base = OTHER; note = 2'-O-methyl ribonucleotide
  modified_base 48: mod_base = OTHER; note = 2'-O-methyl ribonucleotide
  modified_base 50: mod_base = OTHER; note = 2'-O-methyl ribonucleotide
  modified_base 52..57: mod_base = OTHER; note = 2'-O-methyl ribonucleotide
  modified_base 60..61: mod_base = OTHER; note = 2'-O-methyl ribonucleotide
  modified_base 66..67: mod_base = OTHER; note = 2'-O-methyl ribonucleotide
  modified_base 70..72: mod_base = OTHER; note = 2'-O-methyl ribonucleotide
  modified_base 74..81: mod_base = OTHER; note = 2'-O-methyl ribonucleotide
  modified_base 83..100: mod_base = OTHER; note = 2'-O-methyl ribonucleotide
  modified_base 1..4: mod_base = OTHER; note = phosphorothioate linkage
  modified_base 97..100: mod_base = OTHER; note = phosphorothioate linkage
  misc_feature 1..5: note = RNA
  misc_feature 6: note = DNA
  misc_feature 7..15: note = RNA
  misc_feature 16: note = DNA
  misc_feature 17..100: note = RNA

SEQ ID NO: 120 - DNA, 100 bp, synthetic construct; identical to SEQ ID NO: 72
  source 1..100: mol_type = other DNA
  modified_base 1..3: mod_base = OTHER; note = 2'-O-methyl ribonucleotide
  modified_base 97..100: mod_base = OTHER; note = 2'-O-methyl ribonucleotide
  modified_base 1..4: mod_base = OTHER; note = phosphorothioate linkage
  modified_base 97..100: mod_base = OTHER; note = phosphorothioate linkage
  misc_feature 1..4: note = RNA
  misc_feature 5: note = DNA
  misc_feature 6: note = RNA
  misc_feature 7: note = DNA
  misc_feature 8: note = RNA
  misc_feature 9: note = DNA
  misc_feature 10: note = RNA
  misc_feature 11: note = DNA
  misc_feature 12: note = RNA
  misc_feature 13: note = DNA
  misc_feature 14: note = RNA
  misc_feature 15: note = DNA
  misc_feature 16: note = RNA
  misc_feature 17: note = DNA
  misc_feature 18: note = RNA
  misc_feature 19: note = DNA
  misc_feature 20..100: note = RNA

SEQ ID NO: 121 - DNA, 100 bp, synthetic construct; identical to SEQ ID NO: 72
  source 1..100: mol_type = other DNA
  modified_base 1..3: mod_base = OTHER; note = 2'-O-methyl ribonucleotide
  modified_base 21: mod_base = OTHER; note = 2'-O-methyl ribonucleotide
  modified_base 28..32: mod_base = OTHER; note = 2'-O-methyl ribonucleotide
  modified_base 34..42: mod_base = OTHER; note = 2'-O-methyl ribonucleotide
  modified_base 46: mod_base = OTHER; note = 2'-O-methyl ribonucleotide
  modified_base 48: mod_base = OTHER; note = 2'-O-methyl ribonucleotide
  modified_base 50: mod_base = OTHER; note = 2'-O-methyl ribonucleotide
  modified_base 52..57: mod_base = OTHER; note = 2'-O-methyl ribonucleotide
  modified_base 60..61: mod_base = OTHER; note = 2'-O-methyl ribonucleotide
  modified_base 66..67: mod_base = OTHER; note = 2'-O-methyl ribonucleotide
  modified_base 70..72: mod_base = OTHER; note = 2'-O-methyl ribonucleotide
  modified_base 74..81: mod_base = OTHER; note = 2'-O-methyl ribonucleotide
  modified_base 83..100: mod_base = OTHER; note = 2'-O-methyl ribonucleotide
  modified_base 1..4: mod_base = OTHER; note = phosphorothioate linkage
  modified_base 97..100: mod_base = OTHER; note = phosphorothioate linkage
  misc_feature 1..4: note = RNA
  misc_feature 5: note = DNA
  misc_feature 6: note = RNA
  misc_feature 7: note = DNA
  misc_feature 8: note = RNA
  misc_feature 9: note = DNA
  misc_feature 10: note = RNA
  misc_feature 11: note = DNA
  misc_feature 12: note = RNA
  misc_feature 13: note = DNA
  misc_feature 14: note = RNA
  misc_feature 15: note = DNA
  misc_feature 16: note = RNA
  misc_feature 17: note = DNA
  misc_feature 18: note = RNA
  misc_feature 19: note = DNA
  misc_feature 20..100: note = RNA

SEQ ID NO: 122 - DNA, 100 bp, synthetic construct; identical to SEQ ID NO: 73
  source 1..100: mol_type = other DNA
  modified_base 1..3: mod_base = OTHER; note = 2'-O-methyl ribonucleotide
  modified_base 97..100: mod_base = OTHER; note = 2'-O-methyl ribonucleotide
  modified_base 1..4: mod_base = OTHER; note = phosphorothioate linkage
  modified_base 97..100: mod_base = OTHER; note = phosphorothioate linkage
  misc_feature 1..4: note = RNA
  misc_feature 5: note = DNA
  misc_feature 6: note = RNA
  misc_feature 7: note = DNA
  misc_feature 8: note = RNA
  misc_feature 9: note = DNA
  misc_feature 10: note = RNA
  misc_feature 11: note = DNA
  misc_feature 12: note = RNA
  misc_feature 13: note = DNA
  misc_feature 14: note = RNA
  misc_feature 15: note = DNA
  misc_feature 16: note = RNA
  misc_feature 17: note = DNA
  misc_feature 18: note = RNA
  misc_feature 19: note = DNA
  misc_feature 20..100: note = RNA

SEQ ID NO: 123 - DNA, 100 bp, synthetic construct; identical to SEQ ID NO: 73
  source 1..100: mol_type = other DNA
  modified_base 1..3: mod_base = OTHER; note = 2'-O-methyl ribonucleotide
  modified_base 21: mod_base = OTHER; note = 2'-O-methyl ribonucleotide
  modified_base 28..32: mod_base = OTHER; note = 2'-O-methyl ribonucleotide
  modified_base 34..42: mod_base = OTHER; note = 2'-O-methyl ribonucleotide
  modified_base 46: mod_base = OTHER; note = 2'-O-methyl ribonucleotide
  modified_base 48: mod_base = OTHER; note = 2'-O-methyl ribonucleotide
  modified_base 50: mod_base = OTHER; note = 2'-O-methyl ribonucleotide
  modified_base 52..57: mod_base = OTHER; note = 2'-O-methyl ribonucleotide
  modified_base 60..61: mod_base = OTHER; note = 2'-O-methyl ribonucleotide
  modified_base 66..67: mod_base = OTHER; note = 2'-O-methyl ribonucleotide
  modified_base 70..72: mod_base = OTHER; note = 2'-O-methyl ribonucleotide
  modified_base 74..81: mod_base = OTHER; note = 2'-O-methyl ribonucleotide
  modified_base 83..100: mod_base = OTHER; note = 2'-O-methyl ribonucleotide
  modified_base 1..4: mod_base = OTHER; note = phosphorothioate linkage
  modified_base 97..100: mod_base = OTHER; note = phosphorothioate linkage
  misc_feature 1..4: note = RNA
  misc_feature 5: note = DNA
  misc_feature 6: note = RNA
  misc_feature 7: note = DNA
  misc_feature 8: note = RNA
  misc_feature 9: note = DNA
  misc_feature 10: note = RNA
  misc_feature 11: note = DNA
  misc_feature 12: note = RNA
  misc_feature 13: note = DNA
  misc_feature 14: note = RNA
  misc_feature 15: note = DNA
  misc_feature 16: note = RNA
  misc_feature 17: note = DNA
  misc_feature 18: note = RNA
  misc_feature 19: note = DNA
  misc_feature 20..100: note = RNA

SEQ ID NO: 124 - DNA, 100 bp, synthetic construct; identical to SEQ ID NO: 72
  source 1..100: mol_type = other DNA
  modified_base 1..3: mod_base = OTHER; note = 2'-O-methyl ribonucleotide
  modified_base 98..100: mod_base = OTHER; note = 2'-O-methyl ribonucleotide
  modified_base 1..4: mod_base = OTHER; note = phosphorothioate linkage
  modified_base 97..100: mod_base = OTHER; note = phosphorothioate linkage
  misc_feature 1..3: note = RNA
  misc_feature 4..10: note = DNA
  misc_feature 11..100: note = RNA

SEQ ID NO: 125 - DNA, 100 bp, synthetic construct; identical to SEQ ID NO: 72
  source 1..100: mol_type = other DNA
  modified_base 1..3: mod_base = OTHER; note = 2'-O-methyl ribonucleotide
  modified_base 21: mod_base = OTHER; note = 2'-O-methyl ribonucleotide
  modified_base 28..32: mod_base = OTHER; note = 2'-O-methyl ribonucleotide
  modified_base 34..42: mod_base = OTHER; note = 2'-O-methyl ribonucleotide
  modified_base 46: mod_base = OTHER; note = 2'-O-methyl ribonucleotide
  modified_base 48: mod_base = OTHER; note = 2'-O-methyl ribonucleotide
  modified_base 50: mod_base = OTHER; note = 2'-O-methyl ribonucleotide
  modified_base 52..57: mod_base = OTHER; note = 2'-O-methyl ribonucleotide
  modified_base 60..61: mod_base = OTHER; note = 2'-O-methyl ribonucleotide
  modified_base 66..67: mod_base = OTHER; note = 2'-O-methyl ribonucleotide
  modified_base 70..72: mod_base = OTHER; note = 2'-O-methyl ribonucleotide
  modified_base 74..81: mod_base = OTHER; note = 2'-O-methyl ribonucleotide
  modified_base 83..100: mod_base = OTHER; note = 2'-O-methyl ribonucleotide
  modified_base 1..4: mod_base = OTHER; note = phosphorothioate linkage
  modified_base 97..100: mod_base = OTHER; note = phosphorothioate linkage
  misc_feature 1..3: note = RNA
  misc_feature 4..10: note = DNA
  misc_feature 11..100: note = RNA

SEQ ID NO: 126 - DNA, 100 bp, synthetic construct; identical to SEQ ID NO: 73
  source 1..100: mol_type = other DNA
  modified_base 1..3: mod_base = OTHER; note = 2'-O-methyl ribonucleotide
  modified_base 98..100: mod_base = OTHER; note = 2'-O-methyl ribonucleotide
  modified_base 1..4: mod_base = OTHER; note = phosphorothioate linkage
  modified_base 97..100: mod_base = OTHER; note = phosphorothioate linkage
  misc_feature 1..3: note = RNA
  misc_feature 4..10: note = DNA
  misc_feature 11..100: note = RNA

SEQ ID NO: 127 - DNA, 100 bp, synthetic construct; identical to SEQ ID NO: 73
  source 1..100: mol_type = other DNA
  modified_base 1..3: mod_base = OTHER; note = 2'-O-methyl ribonucleotide
  modified_base 21: mod_base = OTHER; note = 2'-O-methyl ribonucleotide
  modified_base 28..32: mod_base = OTHER; note = 2'-O-methyl ribonucleotide
  modified_base 34..42: mod_base = OTHER; note = 2'-O-methyl ribonucleotide
  modified_base 46: mod_base = OTHER; note = 2'-O-methyl ribonucleotide
  modified_base 48: mod_base = OTHER; note = 2'-O-methyl ribonucleotide
  modified_base 50: mod_base = OTHER; note = 2'-O-methyl ribonucleotide
  modified_base 52..57: mod_base = OTHER; note = 2'-O-methyl ribonucleotide
  modified_base 60..61: mod_base = OTHER; note = 2'-O-methyl ribonucleotide
  modified_base 66..67: mod_base = OTHER; note = 2'-O-methyl ribonucleotide
  modified_base 70..72: mod_base = OTHER; note = 2'-O-methyl ribonucleotide
  modified_base 74..81: mod_base = OTHER; note = 2'-O-methyl ribonucleotide
  modified_base 83..100: mod_base = OTHER; note = 2'-O-methyl ribonucleotide
  modified_base 1..4: mod_base = OTHER; note = phosphorothioate linkage
  modified_base 97..100: mod_base = OTHER; note = phosphorothioate linkage
  misc_feature 1..3: note = RNA
  misc_feature 4..10: note = DNA
  misc_feature 11..100: note = RNA

SEQ ID NO: 128 - DNA, 100 bp, synthetic construct; identical to SEQ ID NO: 72
  source 1..100: mol_type = other DNA
  modified_base 1..2: mod_base = OTHER; note = 2'-O-methyl ribonucleotide
  modified_base 98..100: mod_base = OTHER; note = 2'-O-methyl ribonucleotide
  modified_base 1..4: mod_base = OTHER; note = phosphorothioate linkage
  modified_base 97..100: mod_base = OTHER; note = phosphorothioate linkage
  misc_feature 1..2: note = RNA
  misc_feature 3..9: note = DNA
  misc_feature 10..100: note = RNA

SEQ ID NO: 129 - DNA, 100 bp, synthetic construct; identical to SEQ ID NO: 72
  source 1..100: mol_type = other DNA
  modified_base 1..2: mod_base = OTHER; note = 2'-O-methyl ribonucleotide
  modified_base 21: mod_base = OTHER; note = 2'-O-methyl ribonucleotide
  modified_base 28..32: mod_base = OTHER; note = 2'-O-methyl ribonucleotide
  modified_base 34..42: mod_base = OTHER; note = 2'-O-methyl ribonucleotide
  modified_base 46: mod_base = OTHER; note = 2'-O-methyl ribonucleotide
  modified_base 48: mod_base = OTHER; note = 2'-O-methyl ribonucleotide
  modified_base 50: mod_base = OTHER; note = 2'-O-methyl ribonucleotide
  modified_base 52..57: mod_base = OTHER; note = 2'-O-methyl ribonucleotide
  modified_base 60..61: mod_base = OTHER; note = 2'-O-methyl ribonucleotide
  modified_base 66..67: mod_base = OTHER; note = 2'-O-methyl ribonucleotide
  modified_base 70..72: mod_base = OTHER; note = 2'-O-methyl ribonucleotide
  modified_base 74..81: mod_base = OTHER; note = 2'-O-methyl ribonucleotide
  modified_base 83..100: mod_base = OTHER; note = 2'-O-methyl ribonucleotide
  modified_base 1..4: mod_base = OTHER; note = phosphorothioate linkage
  modified_base 97..100: mod_base = OTHER; note = phosphorothioate linkage
  misc_feature 1..2: note = RNA
  misc_feature 3..9: note = DNA
  misc_feature 10..100: note = RNA

SEQ ID NO: 130 - DNA, 100 bp, synthetic construct; identical to SEQ ID NO: 73
  source 1..100: mol_type = other DNA
  modified_base 1..2: mod_base = OTHER; note = 2'-O-methyl ribonucleotide
  modified_base 98..100: mod_base = OTHER; note = 2'-O-methyl ribonucleotide
  modified_base 1..4: mod_base = OTHER; note = phosphorothioate linkage
  modified_base 97..100: mod_base = OTHER; note = phosphorothioate linkage
  misc_feature 1..2: note = RNA
  misc_feature 3..9: note = DNA
  misc_feature 10..100: note = RNA

SEQ ID NO: 131 - DNA, 100 bp, synthetic construct; identical to SEQ ID NO: 73
  source 1..100: mol_type = other DNA
  modified_base 1..2: mod_base = OTHER; note = 2'-O-methyl ribonucleotide
  modified_base 21: mod_base = OTHER; note = 2'-O-methyl ribonucleotide
  modified_base 28..32: mod_base = OTHER; note = 2'-O-methyl ribonucleotide
  modified_base 34..42: mod_base = OTHER; note = 2'-O-methyl ribonucleotide
  modified_base 46: mod_base = OTHER; note = 2'-O-methyl ribonucleotide
  modified_base 48: mod_base = OTHER; note = 2'-O-methyl ribonucleotide
  modified_base 50: mod_base = OTHER; note = 2'-O-methyl ribonucleotide
  modified_base 52..57: mod_base = OTHER; note = 2'-O-methyl ribonucleotide
  modified_base 60..61: mod_base = OTHER; note = 2'-O-methyl ribonucleotide
  modified_base 66..67: mod_base = OTHER; note = 2'-O-methyl ribonucleotide
  modified_base 70..72: mod_base = OTHER; note = 2'-O-methyl ribonucleotide
  modified_base 74..81: mod_base = OTHER; note = 2'-O-methyl ribonucleotide
  modified_base 83..100: mod_base = OTHER; note = 2'-O-methyl ribonucleotide
  modified_base 1..4: mod_base = OTHER; note = phosphorothioate linkage
  modified_base 97..100: mod_base = OTHER; note = phosphorothioate linkage
  misc_feature 1..2: note = RNA
  misc_feature 3..9: note = DNA
  misc_feature 10..100: note = RNA

SEQ ID NO: 132 - DNA, 100 bp, synthetic construct; identical to SEQ ID NO: 72
  source 1..100: mol_type = other DNA
  modified_base 1..2: mod_base = OTHER; note = 2'-O-methyl ribonucleotide
  modified_base 98..100: mod_base = OTHER; note = 2'-O-methyl ribonucleotide
  modified_base 1..4: mod_base = OTHER; note = phosphorothioate linkage
  modified_base 97..100: mod_base = OTHER; note = phosphorothioate linkage
  misc_feature 1..2: note = RNA
  misc_feature 3..4: note = DNA
  misc_feature 5: note = RNA
  misc_feature 6..9: note = DNA
  misc_feature 10..100: note = RNA

SEQ ID NO: 133 - DNA, 100 bp, synthetic construct; identical to SEQ ID NO: 72
  source 1..100: mol_type = other DNA
  modified_base 1..2: mod_base = OTHER; note = 2'-O-methyl ribonucleotide
  modified_base 21: mod_base = OTHER; note = 2'-O-methyl ribonucleotide
  modified_base 28..32: mod_base = OTHER; note = 2'-O-methyl ribonucleotide
  modified_base 34..42: mod_base = OTHER; note = 2'-O-methyl ribonucleotide
  modified_base 46: mod_base = OTHER; note = 2'-O-methyl ribonucleotide
  modified_base 48: mod_base = OTHER; note = 2'-O-methyl ribonucleotide
  modified_base 50: mod_base = OTHER; note = 2'-O-methyl ribonucleotide
  modified_base 52..57: mod_base = OTHER; note = 2'-O-methyl ribonucleotide
  modified_base 60..61: mod_base = OTHER; note = 2'-O-methyl ribonucleotide
  modified_base 66..67: mod_base = OTHER; note = 2'-O-methyl ribonucleotide
  modified_base 70..72: mod_base = OTHER; note = 2'-O-methyl ribonucleotide
  modified_base 74..81: mod_base = OTHER; note = 2'-O-methyl ribonucleotide
  modified_base 83..100: mod_base = OTHER; note = 2'-O-methyl ribonucleotide
  modified_base 1..4: mod_base = OTHER; note = phosphorothioate linkage
  modified_base 97..100: mod_base = OTHER; note = phosphorothioate linkage
  misc_feature 1..2: note = RNA
  misc_feature 3..4: note = DNA
  misc_feature 5: note = RNA
  misc_feature 6..9: note = DNA
  misc_feature 10..100: note = RNA

SEQ ID NO: 134 - DNA, 100 bp, synthetic construct; identical to SEQ ID NO: 73
  source 1..100: mol_type = other DNA
  modified_base 1..2: mod_base = OTHER; note = 2'-O-methyl ribonucleotide
  modified_base 98..100: mod_base = OTHER; note = 2'-O-methyl ribonucleotide
  modified_base 1..4: mod_base = OTHER; note = phosphorothioate linkage
  modified_base 97..100: mod_base = OTHER; note = phosphorothioate linkage
  misc_feature 1..2: note = RNA
  misc_feature 3..4: note = DNA
  misc_feature 5: note = RNA
  misc_feature 6..9: note = DNA
  misc_feature 10..100: note = RNA

SEQ ID NO: 135 - DNA, 100 bp, synthetic construct; identical to SEQ ID NO: 73
  source 1..100: mol_type = other DNA
  modified_base 1..2: mod_base = OTHER; note = 2'-O-methyl ribonucleotide
  modified_base 21: mod_base = OTHER; note = 2'-O-methyl ribonucleotide
  modified_base 28..32: mod_base = OTHER; note = 2'-O-methyl ribonucleotide
  modified_base 34..42: mod_base = OTHER; note = 2'-O-methyl ribonucleotide
  modified_base 46: mod_base = OTHER; note = 2'-O-methyl ribonucleotide
  modified_base 48: mod_base = OTHER; note = 2'-O-methyl ribonucleotide
  modified_base 50: mod_base = OTHER; note = 2'-O-methyl ribonucleotide
  modified_base 52..57: mod_base = OTHER; note = 2'-O-methyl ribonucleotide
  modified_base 60..61: mod_base = OTHER; note = 2'-O-methyl ribonucleotide
  modified_base 66..67: mod_base = OTHER; note = 2'-O-methyl ribonucleotide
  modified_base 70..72: mod_base = OTHER; note = 2'-O-methyl ribonucleotide
  modified_base 74..81: mod_base = OTHER; note = 2'-O-methyl ribonucleotide
  modified_base 83..100: mod_base = OTHER; note = 2'-O-methyl ribonucleotide
  modified_base 1..4: mod_base = OTHER; note = phosphorothioate linkage
  modified_base 97..100: mod_base = OTHER; note = phosphorothioate linkage
  misc_feature 1..2: note = RNA
  misc_feature 3..4: note = DNA
  misc_feature 5: note = RNA
  misc_feature 6..9: note = DNA
  misc_feature 10..100: note = RNA

SEQ ID NO: 136 - DNA, 100 bp, synthetic construct; identical to SEQ ID NO: 72
  source 1..100: mol_type = other DNA
  modified_base 1..2: mod_base = OTHER; note = 2'-O-methyl ribonucleotide
  modified_base 98..100: mod_base = OTHER; note = 2'-O-methyl ribonucleotide
  modified_base 1..4: mod_base = OTHER; note = phosphorothioate linkage
  modified_base 97..100: mod_base = OTHER; note = phosphorothioate linkage
  misc_feature 1..2: note = RNA
  misc_feature 3..10: note = DNA
  misc_feature 11..100: note = RNA

SEQ ID NO: 137 - DNA, 100 bp, synthetic construct; identical to SEQ ID NO: 72
  source 1..100: mol_type = other DNA
  modified_base 1..2: mod_base = OTHER; note = 2'-O-methyl ribonucleotide
  modified_base 21: mod_base = OTHER; note = 2'-O-methyl ribonucleotide
  modified_base 28..32: mod_base = OTHER; note = 2'-O-methyl ribonucleotide
  modified_base 34..42: mod_base = OTHER; note = 2'-O-methyl ribonucleotide
  modified_base 46: mod_base = OTHER; note = 2'-O-methyl ribonucleotide
  modified_base 48: mod_base = OTHER; note = 2'-O-methyl ribonucleotide
  modified_base 50: mod_base = OTHER; note = 2'-O-methyl ribonucleotide
  modified_base 52..57: mod_base = OTHER; note = 2'-O-methyl ribonucleotide
  modified_base 60..61: mod_base = OTHER; note = 2'-O-methyl ribonucleotide
  modified_base 66..67: mod_base = OTHER; note = 2'-O-methyl ribonucleotide
  modified_base 70..72: mod_base = OTHER; note = 2'-O-methyl ribonucleotide
  modified_base 74..81: mod_base = OTHER; note = 2'-O-methyl ribonucleotide
  modified_base 83..100: mod_base = OTHER; note = 2'-O-methyl ribonucleotide
  modified_base 1..4: mod_base = OTHER; note = phosphorothioate linkage
  modified_base 97..100: mod_base = OTHER; note = phosphorothioate linkage
  misc_feature 1..2: note = RNA
  misc_feature 3..10: note = DNA
  misc_feature 11..100: note = RNA

SEQ ID NO: 138 - DNA, 100 bp, synthetic construct; identical to SEQ ID NO: 73
  source 1..100: mol_type = other DNA
  modified_base 1..2: mod_base = OTHER; note = 2'-O-methyl ribonucleotide
  modified_base 98..100: mod_base = OTHER; note = 2'-O-methyl ribonucleotide
  modified_base 1..4: mod_base = OTHER; note = phosphorothioate linkage
  modified_base 97..100: mod_base = OTHER; note = phosphorothioate linkage
  misc_feature 1..2: note = RNA
  misc_feature 3..10: note = DNA
  misc_feature 11..100: note = RNA

SEQ ID NO: 139 - DNA, 100 bp, synthetic construct; identical to SEQ ID NO: 73
  source 1..100: mol_type = other DNA
  modified_base 1..2: mod_base = OTHER; note = 2'-O-methyl ribonucleotide
  modified_base 21: mod_base = OTHER; note = 2'-O-methyl ribonucleotide
  modified_base 28..32: mod_base = OTHER; note = 2'-O-methyl ribonucleotide
  modified_base 34..42: mod_base = OTHER; note = 2'-O-methyl ribonucleotide
  modified_base 46: mod_base = OTHER; note = 2'-O-methyl ribonucleotide
  modified_base 48: mod_base = OTHER; note = 2'-O-methyl ribonucleotide
  modified_base 50: mod_base = OTHER; note = 2'-O-methyl ribonucleotide
  modified_base 52..57: mod_base = OTHER; note = 2'-O-methyl ribonucleotide
  modified_base 60..61: mod_base = OTHER; note = 2'-O-methyl ribonucleotide
  modified_base 66..67: mod_base = OTHER; note = 2'-O-methyl ribonucleotide
  modified_base 70..72: mod_base = OTHER; note = 2'-O-methyl ribonucleotide
  modified_base 74..81: mod_base = OTHER; note = 2'-O-methyl ribonucleotide
  modified_base 83..100: mod_base = OTHER; note = 2'-O-methyl ribonucleotide
  modified_base 1..4: mod_base = OTHER; note = phosphorothioate linkage
  modified_base 97..100: mod_base = OTHER; note = phosphorothioate linkage
  misc_feature 1..2: note = RNA
  misc_feature 3..10: note = DNA
  misc_feature 11..100: note = RNA

SEQ ID NO: 140 - DNA, 100 bp, synthetic construct; identical to SEQ ID NO: 72
  source 1..100: mol_type = other DNA
  modified_base 1..2: mod_base = OTHER; note = 2'-O-methyl ribonucleotide
  modified_base 98..100: mod_base = OTHER; note = 2'-O-methyl ribonucleotide
  modified_base 1..4: mod_base = OTHER; note = phosphorothioate linkage
  modified_base 97..100: mod_base = OTHER; note = phosphorothioate linkage
  misc_feature 1..2: note = RNA
  misc_feature 3..4: note = DNA
  misc_feature 5: note = RNA
  misc_feature 6..10: note = DNA
  misc_feature 11..100: note = RNA

SEQ ID NO: 141 - DNA, 100 bp, synthetic construct; identical to SEQ ID NO: 72
  source 1..100: mol_type = other DNA
  modified_base 1..2: mod_base = OTHER; note = 2'-O-methyl ribonucleotide
  modified_base 21: mod_base = OTHER; note = 2'-O-methyl ribonucleotide
  modified_base 28..32: mod_base = OTHER; note = 2'-O-methyl ribonucleotide
  modified_base 34..42: mod_base = OTHER; note = 2'-O-methyl ribonucleotide
  modified_base 46: mod_base = OTHER; note = 2'-O-methyl ribonucleotide
  modified_base 48: mod_base = OTHER; note = 2'-O-methyl ribonucleotide
  modified_base 50: mod_base = OTHER; note = 2'-O-methyl ribonucleotide
  modified_base 52..57: mod_base = OTHER; note = 2'-O-methyl ribonucleotide
  modified_base 60..61: mod_base = OTHER; note = 2'-O-methyl ribonucleotide
  modified_base 66..67: mod_base = OTHER; note = 2'-O-methyl ribonucleotide
  modified_base 70..72: mod_base = OTHER; note = 2'-O-methyl ribonucleotide
  modified_base 74..81: mod_base = OTHER; note = 2'-O-methyl ribonucleotide
  modified_base 83..100: mod_base = OTHER; note = 2'-O-methyl ribonucleotide
  modified_base 1..4: mod_base = OTHER; note = phosphorothioate linkage
  modified_base 97..100: mod_base = OTHER; note = phosphorothioate linkage
  misc_feature 1..2: note = RNA
  misc_feature 3..4: note = DNA
  misc_feature 5: note = RNA
  misc_feature 6..10: note = DNA
  misc_feature 11..100: note = RNA

SEQ ID NO: 142 - DNA, 100 bp, synthetic construct; identical to SEQ ID NO: 72
  source 1..100: mol_type = other DNA
  modified_base 1..2: mod_base = OTHER; note = 2'-O-methyl ribonucleotide
  modified_base 98..100: mod_base = OTHER; note = 2'-O-methyl ribonucleotide
  modified_base 1..4: mod_base = OTHER; note = phosphorothioate linkage
  modified_base 97..100: mod_base = OTHER; note = phosphorothioate linkage
  misc_feature 1..2: note = RNA
  misc_feature 3..4: note = DNA
  misc_feature 5..6: note = RNA
  misc_feature 7..9: note = DNA
  misc_feature 10..100: note = RNA

SEQ ID NO: 143 - DNA, 100 bp, synthetic construct; identical to SEQ ID NO: 72
  source 1..100: mol_type = other DNA
  modified_base 1..2: mod_base = OTHER; note = 2'-O-methyl ribonucleotide
  modified_base 21: mod_base = OTHER; note = 2'-O-methyl ribonucleotide
  modified_base 28..32: mod_base = OTHER; note = 2'-O-methyl ribonucleotide
  modified_base 34..42: mod_base = OTHER; note = 2'-O-methyl ribonucleotide
  modified_base 46: mod_base = OTHER; note = 2'-O-methyl ribonucleotide
  modified_base 48: mod_base = OTHER; note = 2'-O-methyl ribonucleotide
  modified_base 50: mod_base = OTHER; note = 2'-O-methyl ribonucleotide
  modified_base 52..57: mod_base = OTHER; note = 2'-O-methyl ribonucleotide
  modified_base 60..61: mod_base = OTHER; note = 2'-O-methyl ribonucleotide
  modified_base 66..67: mod_base = OTHER; note = 2'-O-methyl ribonucleotide
  modified_base 70..72: mod_base = OTHER; note = 2'-O-methyl ribonucleotide
  modified_base 74..81: mod_base = OTHER; note = 2'-O-methyl ribonucleotide
  modified_base 83..100: mod_base = OTHER; note = 2'-O-methyl ribonucleotide
  modified_base 1..4: mod_base = OTHER; note = phosphorothioate linkage
  modified_base 97..100: mod_base = OTHER; note = phosphorothioate linkage
  misc_feature 1..2: note = RNA
  misc_feature 3..4: note = DNA
  misc_feature 5..6: note = RNA
  misc_feature 7..9: note = DNA
  misc_feature 10..100: note = RNA

SEQ ID NO: 144 - DNA, 100 bp, synthetic construct; identical to SEQ ID NO: 72
  source 1..100: mol_type = other DNA
  modified_base 1..2: mod_base = OTHER; note = 2'-O-methyl ribonucleotide
  modified_base 98..100: mod_base = OTHER; note = 2'-O-methyl ribonucleotide
  modified_base 1..4: mod_base = OTHER; note = phosphorothioate linkage
  modified_base 97..100: mod_base = OTHER; note = phosphorothioate linkage
  misc_feature 1..2: note = RNA
  misc_feature 3..4: note = DNA
  misc_feature 5..6: note = RNA
  misc_feature 7..10: note = DNA
  misc_feature 11..100: note = RNA

SEQ ID NO: 145 - DNA, 100 bp, synthetic construct; identical to SEQ ID NO: 72
  source 1..100: mol_type = other DNA
  modified_base 1..2: mod_base = OTHER; note = 2'-O-methyl ribonucleotide
  modified_base 21: mod_base = OTHER; note = 2'-O-methyl ribonucleotide
  modified_base 28..32: mod_base = OTHER; note = 2'-O-methyl ribonucleotide
  modified_base 34..42: mod_base = OTHER; note = 2'-O-methyl ribonucleotide
  modified_base 46: mod_base = OTHER; note = 2'-O-methyl ribonucleotide
  modified_base 48: mod_base = OTHER; note = 2'-O-methyl ribonucleotide
  modified_base 50: mod_base = OTHER; note = 2'-O-methyl ribonucleotide
  modified_base 52..57: mod_base = OTHER; note = 2'-O-methyl ribonucleotide
  modified_base 60..61: mod_base = OTHER; note = 2'-O-methyl ribonucleotide
  modified_base 66..67: mod_base = OTHER; note = 2'-O-methyl ribonucleotide
  modified_base 70..72: mod_base = OTHER; note = 2'-O-methyl ribonucleotide
  modified_base 74..81: mod_base = OTHER; note = 2'-O-methyl ribonucleotide
  modified_base 83..100: mod_base = OTHER; note = 2'-O-methyl ribonucleotide
  modified_base 1..4: mod_base = OTHER; note = phosphorothioate linkage
  modified_base 97..100: mod_base = OTHER; note = phosphorothioate linkage
  misc_feature 1..2: note = RNA
  misc_feature 3..4: note = DNA
  misc_feature 5..6: note = RNA
  misc_feature 7..10: note = DNA
  misc_feature 11..100: note = RNA

SEQ ID NO: 146 - DNA, 100 bp, synthetic construct; identical to SEQ ID NO: 72
  source 1..100: mol_type = other DNA
  modified_base 1..2: mod_base = OTHER; note = 2'-O-methyl ribonucleotide
  modified_base 98..100: mod_base = OTHER; note = 2'-O-methyl ribonucleotide
  modified_base 1..4: mod_base = OTHER; note = phosphorothioate linkage
  modified_base 97..100: mod_base = OTHER; note = phosphorothioate linkage
  misc_feature 1..2: note = RNA
  misc_feature 3: note = DNA
  misc_feature 4: note = RNA
  misc_feature 5: note = DNA
  misc_feature 6: note = RNA
  misc_feature 7: note = DNA
  misc_feature 8: note = RNA
  misc_feature 9: note = DNA
  misc_feature 10..100: note = RNA

SEQ ID NO: 147 - DNA, 100 bp, synthetic construct; identical to SEQ ID NO: 72
  source 1..100: mol_type = other DNA
  modified_base 1..2: mod_base = OTHER; note = 2'-O-methyl ribonucleotide
  modified_base 21: mod_base = OTHER; note = 2'-O-methyl ribonucleotide
  modified_base 28..32: mod_base = OTHER; note = 2'-O-methyl ribonucleotide
  modified_base 34..42: mod_base = OTHER; note = 2'-O-methyl ribonucleotide
  modified_base 46: mod_base = OTHER; note = 2'-O-methyl ribonucleotide
  modified_base 48: mod_base = OTHER; note = 2'-O-methyl ribonucleotide
  modified_base 50: mod_base = OTHER; note = 2'-O-methyl ribonucleotide
  modified_base 52..57: mod_base = OTHER; note = 2'-O-methyl ribonucleotide
  modified_base 60..61: mod_base = OTHER; note = 2'-O-methyl ribonucleotide
  modified_base 66..67: mod_base = OTHER; note = 2'-O-methyl ribonucleotide
  modified_base 70..72: mod_base = OTHER; note = 2'-O-methyl ribonucleotide
  modified_base 74..81: mod_base = OTHER; note = 2'-O-methyl ribonucleotide
  modified_base 83..100: mod_base = OTHER; note = 2'-O-methyl ribonucleotide
  modified_base 1..4: mod_base = OTHER; note = phosphorothioate linkage
  modified_base 97..100: mod_base = OTHER; note = phosphorothioate linkage
  misc_feature 1..2: note = RNA
  misc_feature 3: note = DNA
  misc_feature 4: note = RNA
  misc_feature 5: note = DNA
  misc_feature 6: note = RNA
  misc_feature 7: note = DNA
  misc_feature 8: note = RNA
  misc_feature 9: note = DNA
  misc_feature 10..100: note = RNA

SEQ ID NO: 148 - DNA, 100 bp, synthetic construct; identical to SEQ ID NO: 72
  source 1..100: mol_type = other DNA
  modified_base 1..3: mod_base = OTHER; note = 2'-O-methyl ribonucleotide
  modified_base 98..100: mod_base = OTHER; note = 2'-O-methyl ribonucleotide
  modified_base 1..4: mod_base = OTHER; note = phosphorothioate linkage
  modified_base 97..100: mod_base = OTHER; note = phosphorothioate linkage
  misc_feature 1..3: note = RNA
  misc_feature 4: note = DNA
  misc_feature 5: note = RNA
  misc_feature 6: note = DNA
  misc_feature 7: note = RNA
  misc_feature 8: note = DNA
  misc_feature 9: note = RNA
  misc_feature 10: note = DNA
  misc_feature 11..100: note = RNA

SEQ ID NO: 149 - DNA, 100 bp, synthetic construct; identical to SEQ ID NO: 72
  source 1..100: mol_type = other DNA
  modified_base 1..3: mod_base = OTHER; note = 2'-O-methyl ribonucleotide
  modified_base 21: mod_base = OTHER; note = 2'-O-methyl ribonucleotide
  modified_base 28..32: mod_base = OTHER; note = 2'-O-methyl ribonucleotide
  modified_base 34..42: mod_base = OTHER; note = 2'-O-methyl ribonucleotide
  modified_base 46: mod_base = OTHER; note = 2'-O-methyl ribonucleotide
  modified_base 48: mod_base = OTHER; note = 2'-O-methyl ribonucleotide
  modified_base 50: mod_base = OTHER; note = 2'-O-methyl ribonucleotide
  modified_base 52..57: mod_base = OTHER; note = 2'-O-methyl ribonucleotide
  modified_base 60..61: mod_base = OTHER; note = 2'-O-methyl ribonucleotide
  modified_base 66..67: mod_base = OTHER; note = 2'-O-methyl ribonucleotide
  modified_base 70..72: mod_base = OTHER; note = 2'-O-methyl ribonucleotide
  modified_base 74..81: mod_base = OTHER; note = 2'-O-methyl ribonucleotide
  modified_base 83..100: mod_base = OTHER; note = 2'-O-methyl ribonucleotide
  modified_base 1..4: mod_base = OTHER; note = phosphorothioate linkage
  modified_base 97..100: mod_base = OTHER; note = phosphorothioate linkage
  misc_feature 1..3: note = RNA
  misc_feature 4: note = DNA
  misc_feature 5: note = RNA
  misc_feature 6: note = DNA
  misc_feature 7: note = RNA
  misc_feature 8: note = DNA
  misc_feature 9: note = RNA
  misc_feature 10: note = DNA
  misc_feature 11..100: note = RNA

SEQ ID NO: 150 - DNA, 100 bp, synthetic construct; identical to SEQ ID NO: 72
  source 1..100: mol_type = other DNA
  modified_base 1..3: mod_base = OTHER; note = 2'-O-methyl ribonucleotide
  modified_base 98..100: mod_base = OTHER; note = 2'-O-methyl ribonucleotide
  modified_base 1..4: mod_base = OTHER; note = phosphorothioate linkage
  modified_base 97..100: mod_base = OTHER; note = phosphorothioate linkage
  misc_feature 1..8: note = RNA
  misc_feature 9: note = DNA
  misc_feature 10..12: note = RNA
  misc_feature 13: note = DNA
  misc_feature 14..100: note = RNA

SEQ ID NO: 151 - DNA, 100 bp, synthetic construct; identical to SEQ ID NO: 72
  source 1..100: mol_type = other DNA
  modified_base 1..3: mod_base = OTHER; note = 2'-O-methyl ribonucleotide
  modified_base 21: mod_base = OTHER; note = 2'-O-methyl ribonucleotide
  modified_base 28..32: mod_base = OTHER; note = 2'-O-methyl ribonucleotide
  modified_base 34..42: mod_base = OTHER; note = 2'-O-methyl ribonucleotide
  modified_base 46: mod_base = OTHER; note = 2'-O-methyl ribonucleotide
  modified_base 48: mod_base = OTHER; note = 2'-O-methyl ribonucleotide
  modified_base 50: mod_base = OTHER; note = 2'-O-methyl ribonucleotide
  modified_base 52..57: mod_base = OTHER; note = 2'-O-methyl ribonucleotide
  modified_base 60..61: mod_base = OTHER; note = 2'-O-methyl ribonucleotide
  modified_base 66..67: mod_base = OTHER; note = 2'-O-methyl ribonucleotide
  modified_base 70..72: mod_base = OTHER; note = 2'-O-methyl ribonucleotide
  modified_base 74..81: mod_base = OTHER; note = 2'-O-methyl ribonucleotide
  modified_base 83..100: mod_base = OTHER; note = 2'-O-methyl ribonucleotide
  modified_base 1..4: mod_base = OTHER; note = phosphorothioate linkage
  modified_base 97..100: mod_base = OTHER; note = phosphorothioate linkage
  misc_feature 1..8: note = RNA
  misc_feature 9: note = DNA
  misc_feature 10..12: note = RNA
  misc_feature 13: note = DNA
  misc_feature 14..100: note = RNA

SEQ ID NO: 152 - DNA, 100 bp, synthetic construct; identical to SEQ ID NO: 72
  source 1..100: mol_type = other DNA
  modified_base 1..3: mod_base = OTHER; note = 2'-O-methyl ribonucleotide
  modified_base 98..100: mod_base = OTHER; note = 2'-O-methyl ribonucleotide
  modified_base 1..4: mod_base = OTHER; note = phosphorothioate linkage
  modified_base 97..100: mod_base = OTHER; note = phosphorothioate linkage
  misc_feature 1..3: note = RNA
  misc_feature 4: note = DNA
  misc_feature 5: note = RNA
  misc_feature 6: note = DNA
  misc_feature 7: note = RNA
  misc_feature 8: note = DNA
  misc_feature 9: note = RNA
  misc_feature 10: note = DNA
  misc_feature 11: note = RNA
  misc_feature 12: note = DNA
  misc_feature 13: note = RNA
  misc_feature 14: note = DNA
  misc_feature 15: note = RNA
  misc_feature 16: note = DNA
  misc_feature 17: note = RNA
  misc_feature 18: note = DNA
  misc_feature 19: note = RNA
  misc_feature 20: note = DNA
  misc_feature 21..100: note = RNA

SEQ ID NO: 153 - DNA, 100 bp, synthetic construct; identical to SEQ ID NO: 72
  source 1..100: mol_type = other DNA
  modified_base 1..3: mod_base = OTHER; note = 2'-O-methyl ribonucleotide
  modified_base 21: mod_base = OTHER; note = 2'-O-methyl ribonucleotide
  modified_base 28..32: mod_base = OTHER; note = 2'-O-methyl ribonucleotide
  modified_base 34..42: mod_base = OTHER; note = 2'-O-methyl ribonucleotide
  modified_base 46: mod_base = OTHER; note = 2'-O-methyl ribonucleotide
  modified_base 48: mod_base = OTHER; note = 2'-O-methyl ribonucleotide
  modified_base 50: mod_base = OTHER; note = 2'-O-methyl ribonucleotide
  modified_base 52..57: mod_base = OTHER; note = 2'-O-methyl ribonucleotide
  modified_base 60..61: mod_base = OTHER; note = 2'-O-methyl ribonucleotide
  modified_base 66..67: mod_base = OTHER; note = 2'-O-methyl ribonucleotide
  modified_base 70..72: mod_base = OTHER; note = 2'-O-methyl ribonucleotide
  modified_base 74..81: mod_base = OTHER; note = 2'-O-methyl ribonucleotide
  modified_base 83..100: mod_base = OTHER; note = 2'-O-methyl ribonucleotide
  modified_base 1..4: mod_base = OTHER; note = phosphorothioate linkage
  modified_base 97..100: mod_base = OTHER; note = phosphorothioate linkage
  misc_feature 1..3: note = RNA
  misc_feature 4: note = DNA
  misc_feature 5: note = RNA
  misc_feature 6: note = DNA
  misc_feature 7: note = RNA
  misc_feature 8: note = DNA
  misc_feature 9: note = RNA
  misc_feature 10: note = DNA
  misc_feature 11: note = RNA
  misc_feature 12: note = DNA
  misc_feature 13: note = RNA
  misc_feature 14: note = DNA
  misc_feature 15: note = RNA
  misc_feature 16: note = DNA
  misc_feature 17: note = RNA
  misc_feature 18: note = DNA
  misc_feature 19: note = RNA
  misc_feature 20: note = DNA
  misc_feature 21..100: note = RNA

SEQ ID NO: 154 - DNA, 100 bp, synthetic construct; identical to SEQ ID NO: 73
  source 1..100: mol_type = other DNA
  modified_base 1..3: mod_base = OTHER; note = 2'-O-methyl ribonucleotide
  modified_base 21: mod_base = OTHER; note = 2'-O-methyl ribonucleotide
  modified_base 28..32: mod_base = OTHER; note = 2'-O-methyl ribonucleotide
  modified_base 34..42: mod_base = OTHER; note = 2'-O-methyl ribonucleotide
  modified_base 46: mod_base = OTHER; note = 2'-O-methyl ribonucleotide
  modified_base 48: mod_base = OTHER; note = 2'-O-methyl ribonucleotide
  modified_base 50: mod_base = OTHER; note = 2'-O-methyl ribonucleotide
  modified_base 52..57: mod_base = OTHER; note = 2'-O-methyl ribonucleotide
  modified_base 60..61: mod_base = OTHER; note = 2'-O-methyl ribonucleotide
  modified_base 66..67: mod_base = OTHER; note = 2'-O-methyl ribonucleotide
  modified_base 70..72: mod_base = OTHER; note = 2'-O-methyl ribonucleotide
  modified_base 74..81: mod_base = OTHER; note = 2'-O-methyl ribonucleotide
  modified_base 83..100: mod_base = OTHER; note = 2'-O-methyl ribonucleotide
  modified_base 1..4: mod_base = OTHER; note = phosphorothioate linkage
  modified_base 97..100: mod_base = OTHER; note = phosphorothioate linkage
  misc_feature 1..3: note = RNA
  misc_feature 4: note = DNA
  misc_feature 5: note = RNA
  misc_feature 6: note = DNA
  misc_feature 7: note = RNA
  misc_feature 8: note = DNA
  misc_feature 9: note = RNA
  misc_feature 10: note = DNA
  misc_feature 11: note = RNA
  misc_feature 12: note = DNA
  misc_feature 13: note = RNA
  misc_feature 14: note = DNA
  misc_feature 15: note = RNA
  misc_feature 16: note = DNA
  misc_feature 17: note = RNA
  misc_feature 18: note = DNA
  misc_feature 19: note = RNA
  misc_feature 20: note = DNA
  misc_feature 21..100: note = RNA

SEQ ID NO: 155 - DNA, 100 bp, synthetic construct; identical to SEQ ID NO: 72
  source 1..100: mol_type = other DNA
  modified_base 1..3: mod_base = OTHER; note = 2'-O-methyl ribonucleotide
  modified_base 98..100: mod_base = OTHER; note = 2'-O-methyl ribonucleotide
  modified_base 1..4: mod_base = OTHER; note = phosphorothioate linkage
  modified_base 97..100: mod_base = OTHER; note = phosphorothioate linkage
  misc_feature 1..11: note = RNA
  misc_feature 12: note = DNA
  misc_feature 13: note = RNA
  misc_feature 14: note = DNA
  misc_feature 15..100: note = RNA

SEQ ID NO: 156 - DNA, 100 bp, synthetic construct; identical to SEQ ID NO: 72
  source 1..100: mol_type = other DNA
  modified_base 1..3: mod_base = OTHER; note = 2'-O-methyl ribonucleotide
  modified_base 21: mod_base = OTHER; note = 2'-O-methyl ribonucleotide
  modified_base 28..32: mod_base = OTHER; note = 2'-O-methyl ribonucleotide
  modified_base 34..42: mod_base = OTHER; note = 2'-O-methyl ribonucleotide
  modified_base 46: mod_base = OTHER; note = 2'-O-methyl ribonucleotide
  modified_base 48: mod_base = OTHER; note = 2'-O-methyl ribonucleotide
  modified_base 50: mod_base = OTHER; note = 2'-O-methyl ribonucleotide
  modified_base 52..57: mod_base = OTHER; note = 2'-O-methyl ribonucleotide
  modified_base 60..61: mod_base = OTHER; note = 2'-O-methyl ribonucleotide
  modified_base 66..67: mod_base = OTHER; note = 2'-O-methyl ribonucleotide
  modified_base 70..72: mod_base = OTHER; note = 2'-O-methyl ribonucleotide
  modified_base 74..81: mod_base = OTHER; note = 2'-O-methyl ribonucleotide
  modified_base 83..100: mod_base = OTHER; note = 2'-O-methyl ribonucleotide
  modified_base 1..4: mod_base = OTHER; note = phosphorothioate linkage
  modified_base 97..100: mod_base = OTHER; note = phosphorothioate linkage
  misc_feature 1..11: note = RNA
  misc_feature 12: note = DNA
  misc_feature 13: note = RNA
  misc_feature 14: note = DNA
  misc_feature 15..100: note = RNA

SEQ ID NO: 157 - DNA, 100 bp, synthetic construct; identical to SEQ ID NO: 72
  source 1..100: mol_type = other DNA
  modified_base 1..2: mod_base = OTHER; note = 2'-O-methyl ribonucleotide
  modified_base 98..100: mod_base = OTHER; note = 2'-O-methyl ribonucleotide
  modified_base 1..4: mod_base = OTHER; note = phosphorothioate linkage
  modified_base 97..100: mod_base = OTHER; note = phosphorothioate linkage
  misc_feature 1..2: note = RNA
  misc_feature 3: note = DNA
  misc_feature 4..6: note = RNA
  misc_feature 7: note = DNA
  misc_feature 8..11: note = RNA
  misc_feature 12: note = DNA
  misc_feature 13: note = RNA
  misc_feature 14: note = DNA
  misc_feature 15..100: note = RNA

SEQ ID NO: 158 - DNA, 100 bp, synthetic construct; identical to SEQ ID NO: 72
  source 1..100: mol_type = other DNA
  modified_base 1..2: mod_base = OTHER; note = 2'-O-methyl ribonucleotide
  modified_base 21: mod_base = OTHER; note = 2'-O-methyl ribonucleotide
  modified_base 28..32: mod_base = OTHER; note = 2'-O-methyl ribonucleotide
  modified_base 34..42: mod_base = OTHER; note = 2'-O-methyl ribonucleotide
  modified_base 46: mod_base = OTHER; note = 2'-O-methyl ribonucleotide
  modified_base 48: mod_base = OTHER; note = 2'-O-methyl ribonucleotide
  modified_base 50: mod_base = OTHER; note = 2'-O-methyl ribonucleotide
  modified_base 52..57: mod_base = OTHER; note = 2'-O-methyl ribonucleotide
  modified_base 60..61: mod_base = OTHER; note = 2'-O-methyl ribonucleotide
  modified_base 66..67: mod_base = OTHER; note = 2'-O-methyl ribonucleotide
  modified_base 70..72: mod_base = OTHER; note = 2'-O-methyl ribonucleotide
  modified_base 74..81: mod_base = OTHER; note = 2'-O-methyl ribonucleotide
  modified_base 83..100: mod_base = OTHER; note = 2'-O-methyl ribonucleotide
  modified_base 1..4: mod_base = OTHER; note = phosphorothioate linkage
  modified_base 97..100: mod_base = OTHER; note = phosphorothioate linkage
  misc_feature 1..2: note = RNA
  misc_feature 3: note = DNA
  misc_feature 4..6: note = RNA
  misc_feature 7: note = DNA
  misc_feature 8..11: note = RNA
  misc_feature 12: note = DNA
  misc_feature 13: note = RNA
  misc_feature 14: note = DNA
  misc_feature 15..100: note = RNA

SEQ ID NO: 159 - DNA, 100 bp, synthetic construct; identical to SEQ ID NO: 72
  source 1..100: mol_type = other DNA
  modified_base 98..100: mod_base = OTHER; note = 2'-O-methyl ribonucleotide
  modified_base 1..4: mod_base = OTHER; note = phosphorothioate linkage
  modified_base 97..100: mod_base = OTHER; note = phosphorothioate linkage
  misc_feature 1..10: note = DNA
  misc_feature 11..100: note = RNA

SEQ ID NO: 160 - DNA, 100 bp, synthetic construct; identical to SEQ ID NO: 72
  source 1..100: mol_type = other DNA
  modified_base 1..3: mod_base = OTHER; note = 2'-O-methyl ribonucleotide
  modified_base 98..100: mod_base = OTHER; note = 2'-O-methyl ribonucleotide
  modified_base 1..4: mod_base = OTHER; note = phosphorothioate linkage
  modified_base 97..100: mod_base = OTHER; note = phosphorothioate linkage
  misc_feature 1..3: note = RNA
  misc_feature 4..6: note = DNA
  misc_feature 7: note = RNA
  misc_feature 8..11: note = DNA
  misc_feature 12..100: note = RNA

SEQ ID NO: 161 - DNA, 100 bp, synthetic construct; identical to SEQ ID NO: 72
  source 1..100: mol_type = other DNA
  modified_base 1: mod_base = OTHER; note = 2'-O-methyl ribonucleotide
  modified_base 3: mod_base = OTHER; note = 2'-O-methyl ribonucleotide
  modified_base 98..100: mod_base = OTHER; note = 2'-O-methyl ribonucleotide
  modified_base 1..4: mod_base = OTHER; note = phosphorothioate linkage
  modified_base 97..100: mod_base = OTHER; note = phosphorothioate linkage
  misc_feature 1: note = RNA
  misc_feature 2: note = DNA
  misc_feature 3: note = RNA
  misc_feature 4..8: note = DNA
  misc_feature 9..10: note = RNA
  misc_feature 11..12: note = DNA
  misc_feature 13..100: note = RNA

SEQ ID NO: 162 - DNA, 100 bp, synthetic construct; identical to SEQ ID NO: 72
  source 1..100: mol_type = other DNA
  modified_base 1: mod_base = OTHER; note = 2'-O-methyl ribonucleotide
  modified_base 3: mod_base = OTHER; note = 2'-O-methyl ribonucleotide
  modified_base 21: mod_base = OTHER; note = 2'-O-methyl ribonucleotide
  modified_base 28..32: mod_base = OTHER; note = 2'-O-methyl ribonucleotide
  modified_base 34..42: mod_base = OTHER; note = 2'-O-methyl ribonucleotide
  modified_base 46: mod_base = OTHER; note = 2'-O-methyl ribonucleotide
  modified_base 48: mod_base = OTHER; note = 2'-O-methyl ribonucleotide
  modified_base 50: mod_base = OTHER; note = 2'-O-methyl ribonucleotide
  modified_base 52..57: mod_base = OTHER; note = 2'-O-methyl ribonucleotide
  modified_base 60..61: mod_base = OTHER; note = 2'-O-methyl ribonucleotide
  modified_base 66..67: mod_base = OTHER; note = 2'-O-methyl ribonucleotide
  modified_base 70..72: mod_base = OTHER; note = 2'-O-methyl ribonucleotide
  modified_base 74..81: mod_base = OTHER; note = 2'-O-methyl ribonucleotide
  modified_base 83..100: mod_base = OTHER; note = 2'-O-methyl ribonucleotide
  modified_base 1..4: mod_base = OTHER; note = phosphorothioate linkage
  modified_base 97..100: mod_base = OTHER; note = phosphorothioate linkage
  misc_feature 1: note = RNA
  misc_feature 2: note = DNA
  misc_feature 3: note = RNA
  misc_feature 4..8: note = DNA
  misc_feature 9..10: note = RNA
  misc_feature 11..12: note = DNA
  misc_feature 13..100: note = RNA

SEQ ID NO: 163 - DNA, 100 bp, synthetic construct; identical to SEQ ID NO: 72
  source 1..100: mol_type = other DNA
  modified_base 1..2: mod_base = OTHER; note = 2'-O-methyl ribonucleotide
  modified_base 98..100: mod_base = OTHER; note = 2'-O-methyl ribonucleotide
  modified_base 1..4: mod_base = OTHER; note = phosphorothioate linkage
  modified_base 97..100: mod_base = OTHER; note = phosphorothioate linkage
  misc_feature 1..2: note = RNA
  misc_feature 3..6: note = DNA
  misc_feature 7: note = RNA
  misc_feature 8..11: note = DNA
  misc_feature 12..100: note = RNA

SEQ ID NO: 164 - DNA, 100 bp, synthetic construct; identical to SEQ ID NO: 72
  source 1..100: mol_type = other DNA
  modified_base 1..3: mod_base = OTHER; note = 2'-O-methyl ribonucleotide
  modified_base 98..100: mod_base = OTHER; note = 2'-O-methyl ribonucleotide
  modified_base 1..4: mod_base = OTHER; note = phosphorothioate linkage
  modified_base 97..100: mod_base = OTHER; note = phosphorothioate linkage
  misc_feature 1..3: note = RNA
  misc_feature 4..7: note = DNA
  misc_feature 8..11: note = RNA
  misc_feature 12..13: note = DNA
  misc_feature 14..20: note = RNA
  misc_feature 21: note = DNA
  misc_feature 22..100: note = RNA

SEQ ID NO: 165 - DNA, 100 bp, synthetic construct; identical to SEQ ID NO: 72
  source 1..100: mol_type = other DNA
  modified_base 2..3: mod_base = OTHER; note = 2'-O-methyl ribonucleotide
  modified_base 98..100: mod_base = OTHER; note = 2'-O-methyl ribonucleotide
  modified_base 1..4: mod_base = OTHER; note = phosphorothioate linkage
  modified_base 97..100: mod_base = OTHER; note = phosphorothioate linkage
  misc_feature 1: note = DNA
  misc_feature 2..3: note = RNA
  misc_feature 4..7: note = DNA
  misc_feature 8..11: note = RNA
  misc_feature 12..13: note = DNA
  misc_feature 14..19: note = RNA
  misc_feature 20: note = DNA
  misc_feature 21..100: note = RNA

SEQ ID NO: 166 - DNA, 100 bp, synthetic construct; identical to SEQ ID NO: 72
  source 1..100: mol_type = other DNA
  modified_base 2..3: mod_base = OTHER; note = 2'-O-methyl ribonucleotide
  modified_base 98..100: mod_base = OTHER; note = 2'-O-methyl ribonucleotide
  modified_base 1..4: mod_base = OTHER; note = phosphorothioate linkage
  modified_base 97..100: mod_base = OTHER; note = phosphorothioate linkage
  misc_feature 1: note = DNA
  misc_feature 2..3: note = RNA
  misc_feature 4..5: note = DNA
  misc_feature 6: note = RNA
  misc_feature 7..11: note = DNA
  misc_feature 12: note = RNA
  misc_feature 13: note = DNA
  misc_feature 14..16: note = RNA
  misc_feature 17: note = DNA
  misc_feature 18..100: note = RNA

SEQ ID NO: 167 - DNA, 100 bp, synthetic construct; identical to SEQ ID NO: 72
  source 1..100: mol_type = other DNA
  modified_base 1..3: mod_base = OTHER; note = 2'-O-methyl ribonucleotide
  modified_base 98..100: mod_base = OTHER; note = 2'-O-methyl ribonucleotide
  modified_base 1..4: mod_base = OTHER; note = phosphorothioate linkage
  modified_base 97..100: mod_base = OTHER; note = phosphorothioate linkage
  misc_feature 1..3: note = RNA
  misc_feature 4..5: note = DNA
  misc_feature 6: note = RNA
  misc_feature 7..11: note = DNA
  misc_feature 12: note = RNA
  misc_feature 13: note = DNA
  misc_feature 14..16: note = RNA
  misc_feature 17: note = DNA
  misc_feature 18..100: note = RNA

SEQ ID NO: 168 - DNA, 100 bp, synthetic construct; identical to SEQ ID NO: 72
  source 1..100: mol_type = other DNA
  modified_base 1..2: mod_base = OTHER; note = 2'-O-methyl ribonucleotide
  modified_base 98..100: mod_base = OTHER; note = 2'-O-methyl ribonucleotide
  modified_base 1..4: mod_base = OTHER; note = phosphorothioate linkage
  modified_base 97..100: mod_base = OTHER; note = phosphorothioate linkage
  misc_feature 1..2: note = RNA
  misc_feature 3..6: note = DNA
  misc_feature 7..100: note = RNA

SEQ ID NO: 169 - DNA, 100 bp, synthetic construct; identical to SEQ ID NO: 72
  source 1..100: mol_type = other DNA
  modified_base 1..2: mod_base = OTHER; note = 2'-O-methyl ribonucleotide
  modified_base 21: mod_base = OTHER; note = 2'-O-methyl ribonucleotide
  modified_base 28..32: mod_base = OTHER; note = 2'-O-methyl ribonucleotide
  modified_base 34..42: mod_base = OTHER; note = 2'-O-methyl ribonucleotide
  modified_base 46: mod_base = OTHER; note = 2'-O-methyl ribonucleotide
  modified_base 48: mod_base = OTHER; note = 2'-O-methyl ribonucleotide
  modified_base 50: mod_base = OTHER; note = 2'-O-methyl ribonucleotide
  modified_base 52..57: mod_base = OTHER; note = 2'-O-methyl ribonucleotide
  modified_base 60..61: mod_base = OTHER; note = 2'-O-methyl ribonucleotide
  modified_base 66..67: mod_base = OTHER; note = 2'-O-methyl ribonucleotide
  modified_base 70..72: mod_base = OTHER; note = 2'-O-methyl ribonucleotide
  modified_base 74..81: mod_base = OTHER; note = 2'-O-methyl ribonucleotide
  modified_base 83..100: mod_base = OTHER; note = 2'-O-methyl ribonucleotide
  modified_base 1..4: mod_base = OTHER; note = phosphorothioate linkage
  modified_base 97..100: mod_base = OTHER; note = phosphorothioate linkage
  misc_feature 1..2: note = RNA
  misc_feature 3..6: note = DNA
  misc_feature 7..100: note = RNA

SEQ ID NO: 170 - DNA, 100 bp, synthetic construct; identical to SEQ ID NO: 73
  source 1..100: mol_type = other DNA
  modified_base 1..2: mod_base = OTHER; note = 2'-O-methyl ribonucleotide
  modified_base 21: mod_base = OTHER; note = 2'-O-methyl ribonucleotide
  modified_base 28..32: mod_base = OTHER; note = 2'-O-methyl ribonucleotide
  modified_base 34..42: mod_base = OTHER; note = 2'-O-methyl ribonucleotide
  modified_base 46: mod_base = OTHER; note = 2'-O-methyl ribonucleotide
  modified_base 48: mod_base = OTHER; note = 2'-O-methyl ribonucleotide
  modified_base 50: mod_base = OTHER; note = 2'-O-methyl ribonucleotide
  modified_base 52..57: mod_base = OTHER; note = 2'-O-methyl ribonucleotide
  modified_base 60..61: mod_base = OTHER; note = 2'-O-methyl ribonucleotide
  modified_base 66..67: mod_base = OTHER; note = 2'-O-methyl ribonucleotide
  modified_base 70..72: mod_base = OTHER; note = 2'-O-methyl ribonucleotide
  modified_base 74..81: mod_base = OTHER; note = 2'-O-methyl ribonucleotide
  modified_base 83..100: mod_base = OTHER; note = 2'-O-methyl ribonucleotide
  modified_base 1..4: mod_base = OTHER; note = phosphorothioate linkage
  modified_base 97..100: mod_base = OTHER; note = phosphorothioate linkage
  misc_feature 1..2: note = RNA
  misc_feature 3..6: note = DNA
  misc_feature 7..100: note = RNA

SEQ ID NO: 171 - DNA, 100 bp, synthetic construct; identical to SEQ ID NO: 72
  source 1..100: mol_type = other DNA
  modified_base 1: mod_base = OTHER; note = 2'-O-methyl ribonucleotide
  modified_base 98..100: mod_base = OTHER; note = 2'-O-methyl ribonucleotide
  modified_base 1..4: mod_base = OTHER; note = phosphorothioate linkage
  modified_base 97..100: mod_base = OTHER; note = phosphorothioate linkage
  misc_feature 1: note = RNA
  misc_feature 2..6: note = DNA
  misc_feature 7: note = RNA
  misc_feature 8: note = DNA
  misc_feature 9: note = RNA
  misc_feature 10: note = DNA
  misc_feature 11: note = RNA
  misc_feature 12: note = DNA
  misc_feature 13: note = RNA
  misc_feature 14: note = DNA
  misc_feature 15: note = RNA
  misc_feature 16: note = DNA
  misc_feature 17: note = RNA
  misc_feature 18: note = DNA
  misc_feature 19: note = RNA
  misc_feature 20: note = DNA
  misc_feature 21..100: note = RNA

SEQ ID NO: 172 - DNA, 100 bp, synthetic construct; identical to SEQ ID NO: 72
  source 1..100: mol_type = other DNA
  modified_base 1: mod_base = OTHER; note = 2'-O-methyl ribonucleotide
  modified_base 98..100: mod_base = OTHER; note = 2'-O-methyl ribonucleotide
  modified_base 1..4: mod_base = OTHER; note = phosphorothioate linkage
  modified_base 97..100: mod_base = OTHER; note = phosphorothioate linkage
  misc_feature 1: note = RNA
  misc_feature 2..6: note = DNA
  misc_feature 7: note = RNA
  misc_feature 8: note = DNA
  misc_feature 9: note = RNA
  misc_feature 10: note = DNA
  misc_feature 11: note = RNA
  misc_feature 12: note = DNA
  misc_feature 13: note = RNA
  misc_feature 14: note = DNA
  misc_feature 15: note = RNA
  misc_feature 16: note = DNA
  misc_feature 17: note = RNA
  misc_feature 18: note = DNA
  misc_feature 19: note = RNA
  misc_feature 20: note = DNA
  misc_feature 21..100: note = RNA

SEQ ID NO: 173 - DNA, 100 bp, synthetic construct; identical to SEQ ID NO: 73
  source 1..100: mol_type = other DNA
  modified_base 1: mod_base = OTHER; note = 2'-O-methyl ribonucleotide
  modified_base 21: mod_base = OTHER; note = 2'-O-methyl ribonucleotide
  modified_base 28..32: mod_base = OTHER; note = 2'-O-methyl ribonucleotide
  modified_base 34..42: mod_base = OTHER; note = 2'-O-methyl ribonucleotide
  modified_base 46: mod_base = OTHER; note = 2'-O-methyl ribonucleotide
  modified_base 48: mod_base = OTHER; note = 2'-O-methyl ribonucleotide
  modified_base 50: mod_base = OTHER; note = 2'-O-methyl ribonucleotide
  modified_base 52..57: mod_base = OTHER; note = 2'-O-methyl ribonucleotide
  modified_base 60..61: mod_base = OTHER; note = 2'-O-methyl ribonucleotide
  modified_base 66..67: mod_base = OTHER; note = 2'-O-methyl ribonucleotide
  modified_base 70..72: mod_base = OTHER; note = 2'-O-methyl ribonucleotide
  modified_base 74..81: mod_base = OTHER; note = 2'-O-methyl ribonucleotide
  modified_base 83..100: mod_base = OTHER; note = 2'-O-methyl ribonucleotide
  modified_base 1..4: mod_base = OTHER; note = phosphorothioate linkage
  modified_base 97..100: mod_base = OTHER; note = phosphorothioate linkage
  misc_feature 1: note = RNA
  misc_feature 2..6: note = DNA
  misc_feature 7: note = RNA
  misc_feature 8: note = DNA
  misc_feature 9: note = RNA
  misc_feature 10: note = DNA
  misc_feature 11: note = RNA
  misc_feature 12: note = DNA
  misc_feature 13: note = RNA
  misc_feature 14: note = DNA
  misc_feature 15: note = RNA
  misc_feature 16: note = DNA
  misc_feature 17: note = RNA
  misc_feature 18: note = DNA
  misc_feature 19: note = RNA
  misc_feature 20: note = DNA
  misc_feature 21..100: note = RNA

SEQ ID NO: 174 - DNA, 100 bp, synthetic construct; identical to SEQ ID NO: 72
  source 1..100: mol_type = other DNA
  modified_base 3..4: mod_base = OTHER; note = 2'-O-methyl ribonucleotide
  modified_base 98..100: mod_base = OTHER; note = 2'-O-methyl ribonucleotide
  modified_base 1..4: mod_base = OTHER; note = phosphorothioate linkage
  modified_base 97..100: mod_base = OTHER; note = phosphorothioate linkage
  misc_feature 1..2: note = DNA
  misc_feature 3..4: note = RNA
  misc_feature 5..11: note = DNA
  misc_feature 12..13: note = RNA
  misc_feature 14: note = DNA
  misc_feature 15: note = RNA
  misc_feature 16: note = DNA
  misc_feature 17: note = RNA
  misc_feature 18: note = DNA
  misc_feature 19..100: note = RNA

SEQ ID NO: 175 - DNA, 100 bp, synthetic construct; identical to SEQ ID NO: 72
  source 1..100: mol_type = other DNA
  modified_base 3..4: mod_base = OTHER; note = 2'-O-methyl ribonucleotide
  modified_base 98..100: mod_base = OTHER; note = 2'-O-methyl ribonucleotide
  modified_base 1..4: mod_base = OTHER; note = phosphorothioate linkage
  modified_base 97..100: mod_base = OTHER; note = phosphorothioate linkage
  misc_feature 1..2: note = DNA
  misc_feature 3..4: note = RNA
  misc_feature 5..11: note = DNA
  misc_feature 12..13: note = RNA
  misc_feature 14: note = DNA
  misc_feature 15..16: note = RNA
  misc_feature 17: note = DNA
  misc_feature 18..100: note = RNA

SEQ ID NO: 176 - DNA, 100 bp, synthetic construct; identical to SEQ ID NO: 72
  source 1..100: mol_type = other DNA
  modified_base 3..4: mod_base = OTHER; note = 2'-O-methyl ribonucleotide
  modified_base 21: mod_base = OTHER; note = 2'-O-methyl ribonucleotide
  modified_base 28..32: mod_base = OTHER; note = 2'-O-methyl ribonucleotide
  modified_base 34..42: mod_base = OTHER; note = 2'-O-methyl ribonucleotide
  modified_base 46: mod_base = OTHER; note = 2'-O-methyl ribonucleotide
  modified_base 48: mod_base = OTHER; note = 2'-O-methyl ribonucleotide
  modified_base 50: mod_base = OTHER; note = 2'-O-methyl ribonucleotide
  modified_base 52..57: mod_base = OTHER; note = 2'-O-methyl ribonucleotide
  modified_base 60..61: mod_base = OTHER; note = 2'-O-methyl ribonucleotide
  modified_base 66..67: mod_base = OTHER; note = 2'-O-methyl ribonucleotide
  modified_base 70..72: mod_base = OTHER; note = 2'-O-methyl ribonucleotide
  modified_base 74..81: mod_base = OTHER; note = 2'-O-methyl ribonucleotide
  modified_base 83..100: mod_base = OTHER; note = 2'-O-methyl ribonucleotide
  modified_base 1..4: mod_base = OTHER; note = phosphorothioate linkage
  modified_base 97..100: mod_base = OTHER; note = phosphorothioate linkage
  misc_feature 1..2: note = DNA
  misc_feature 3..4: note = RNA
  misc_feature 5..11: note = DNA
  misc_feature 12..13: note = RNA
  misc_feature 14: note = DNA
  misc_feature 15..16: note = RNA
  misc_feature 17: note = DNA
  misc_feature 18..100: note = RNA

SEQ ID NO: 177 - DNA, 20 bp, synthetic construct
  source 1..20: mol_type = other DNA
aagatacctgaataactctc

SEQ ID NO: 178 - DNA, 20 bp, synthetic construct
  source 1..20: mol_type = other DNA
aagatacctgaataaccctc

SEQ ID NO: 179 - DNA, 20 bp, synthetic construct
  source 1..20: mol_type = other DNA
aagatacctgaataaccctc

SEQ ID NO: 180 - DNA, 20 bp, synthetic construct
  source 1..20: mol_type = other DNA
aagatacctgaataaccctc

SEQ ID NO: 181 - DNA, 20 bp, synthetic construct
  source 1..20: mol_type = other DNA
aagatacctgaataaccctc

SEQ ID NO: 182 - DNA, 20 bp, synthetic construct
  source 1..20: mol_type = other DNA
aagatacctgaataaccctc

SEQ ID NO: 183 - DNA, 20 bp, synthetic construct
  source 1..20: mol_type = other DNA
aagatacctgaataaccctc

SEQ ID NO: 184 - DNA, 20 bp, synthetic construct
  source 1..20: mol_type = other DNA
aagatacctgaataaccctc

SEQ ID NO: 185 - DNA, 20 bp, synthetic construct
  source 1..20: mol_type = other DNA
aagatacctgaataaccctc

SEQ ID NO: 186 - DNA, 20 bp, synthetic construct
  source 1..20: mol_type = other DNA
aagatacctgaataaccctc

SEQ ID NO: 187 - DNA, 20 bp, synthetic construct
  source 1..20: mol_type = other DNA
aagatacctgaataaccctc

SEQ ID NO: 188 - DNA, 20 bp, synthetic construct
  source 1..20: mol_type = other DNA
aagatacctgaataaccctc

SEQ ID NO: 189 - DNA, 20 bp, synthetic construct
  source 1..20: mol_type = other DNA
aagatacctgaataaccctc

SEQ ID NO: 190 - DNA, 20 bp, synthetic construct
  source 1..20: mol_type = other DNA
aagatacctgaataaccctc

SEQ ID NO: 191 - DNA, 20 bp, synthetic construct
  source 1..20: mol_type = other DNA
aagatacctgaataaccctc

SEQ ID NO: 192 - DNA, 20 bp, synthetic construct
  source 1..20: mol_type = other DNA
aagatacctgaataaccctc

SEQ ID NO: 193 - DNA, 20 bp, synthetic construct
  source 1..20: mol_type = other DNA
aagatacctgaataaccctc

SEQ ID NO: 194 - DNA, 20 bp, synthetic construct
  source 1..20: mol_type = other DNA
aagatacctgaataaccctc

SEQ ID NO: 195 - DNA, 20 bp, synthetic construct
  source 1..20: mol_type = other DNA
aagatacctgaataaccctc

SEQ ID NO: 196 - DNA, 20 bp, synthetic construct
  source 1..20: mol_type = other DNA
aagatacctgaataaccctc

SEQ ID NO: 197 - DNA, 20 bp, synthetic construct
  source 1..20: mol_type = other DNA
aagatacctgaataaccctc

SEQ ID NO: 198 - DNA, 20 bp, synthetic construct
  source 1..20: mol_type = other DNA
aagatacctgaataaccctc

SEQ ID NO: 199 - DNA, 20 bp, synthetic construct
  source 1..20: mol_type = other DNA
aagatacctgaataaccctc

SEQ ID NO: 200 - DNA, 20 bp, synthetic construct
  source 1..20: mol_type = other DNA
aagatacctgaataaccctc

SEQ ID NO: 201 - DNA, 20 bp, synthetic construct
  source 1..20: mol_type = other DNA
aagatacctgaataaccctc

SEQ ID NO: 202 - DNA, 20 bp, synthetic construct
  source 1..20: mol_type = other DNA
aagatacctgaataaccctc

SEQ ID NO: 203 - DNA, 20 bp, synthetic construct
  source 1..20: mol_type = other DNA
aagatacctgaataaccctc

SEQ ID NO: 204 - DNA, 20 bp, synthetic construct
  source 1..20: mol_type = other DNA
aagatacctgaataaccctc

SEQ ID NO: 205 - DNA, 20 bp, synthetic construct
  source 1..20: mol_type = other DNA
aagatacctgaataaccctc

SEQ ID NO: 206 - DNA, 20 bp, synthetic construct
  source 1..20: mol_type = other DNA
aagatacctgaataaccctc

SEQ ID NO: 207 - DNA, 20 bp, synthetic construct
  source 1..20: mol_type = other DNA
aagatacctgaataaccctc

SEQ ID NO: 208 - DNA, 20 bp, synthetic construct
  source 1..20: mol_type = other DNA
aagatacctgaataaccctc

SEQ ID NO: 209 - DNA, 20 bp, synthetic construct
  source 1..20: mol_type = other DNA
aagatacctgaataaccctc

SEQ ID NO: 210 - DNA, 20 bp, synthetic construct
  source 1..20: mol_type = other DNA
aagatacctgaataaccctc

SEQ ID NO: 211 - DNA, 24 bp, synthetic construct
  source 1..24: mol_type = other DNA
tcggaagatacctgaataaccctc

SEQ ID NO: 212 - DNA, 20 bp, synthetic construct
  source 1..20: mol_type = other DNA
aagatacctgaataaccctc

SEQ ID NO: 213 - DNA, 20 bp, synthetic construct
  source 1..20: mol_type = other DNA
aagatacctgaataaccctc

SEQ ID NO: 214 - DNA, 20 bp, synthetic construct
  source 1..20: mol_type = other DNA
aagatacctgaataactctc

SEQ ID NO: 215 - DNA, 20 bp, synthetic construct
  source 1..20: mol_type = other DNA
aagatacctgaataactctc

SEQ ID NO: 216 - DNA, 20 bp, synthetic construct
  source 1..20: mol_type = other DNA
aagatacctgaataactctc

SEQ ID NO: 217 - DNA, 20 bp, synthetic construct
  source 1..20: mol_type = other DNA
aagatacctgaataactctc

SEQ ID NO: 218 - DNA, 20 bp, synthetic construct
  source 1..20: mol_type = other DNA
aagatacctgaataactctc

SEQ ID NO: 219 - DNA, 20 bp, synthetic construct
  source 1..20: mol_type = other DNA
aagatacctgaataaccctc

SEQ ID NO: 220 - DNA, 20 bp, synthetic construct
  source 1..20: mol_type = other DNA
aagatacctgaataaccctc

SEQ ID NO: 221 - DNA, 20 bp, synthetic construct
  source 1..20: mol_type = other DNA
aagatacctgaataaccctc

SEQ ID NO: 222 - DNA, 20 bp, synthetic construct
  source 1..20: mol_type = other DNA
aagatacctgaataaccctc

SEQ ID NO: 223 - DNA, 20 bp, synthetic construct
  source 1..20: mol_type = other DNA
aagatacctgaataaccctc

SEQ ID NO: 224 - DNA, 20 bp, synthetic construct
  source 1..20: mol_type = other DNA
aagatacctgaataaccctc

SEQ ID NO: 225 - DNA, 20 bp, synthetic construct
  source 1..20: mol_type = other DNA
aagatacctgaataaccctc

SEQ ID NO: 226 - DNA, 20 bp, synthetic construct
  source 1..20: mol_type = other DNA
aagatacctgaataaccctc

SEQ ID NO: 227 - DNA, 20 bp, synthetic construct
  source 1..20: mol_type = other DNA
aagatacctgaataaccctc

SEQ ID NO: 228 - DNA, 20 bp, synthetic construct
  source 1..20: mol_type = other DNA
aagatacctgaataaccctc

SEQ ID NO: 229 - DNA, 20 bp, synthetic construct
  source 1..20: mol_type = other DNA
aagatacctgaataaccctc

SEQ ID NO: 230 - DNA, 20 bp, synthetic construct
  source 1..20: mol_type = other DNA
aagatacctgaataaccctc

SEQ ID NO: 231 - DNA, 20 bp, synthetic construct
  source 1..20: mol_type = other DNA
aagatacctgaataaccctc

SEQ ID NO: 232 - DNA, 20 bp, synthetic construct
  source 1..20: mol_type = other DNA
aagatacctgaataaccctc

SEQ ID NO: 233 - DNA, 20 bp, synthetic construct
  source 1..20: mol_type = other DNA
aagatacctgaataaccctc

SEQ ID NO: 234 - DNA, 20 bp, synthetic construct
  source 1..20: mol_type = other DNA
aagatacctgaataaccctc

SEQ ID NO: 235 - DNA, 20 bp, synthetic construct
  source 1..20: mol_type = other DNA
aagatacctgaataaccctc

SEQ ID NO: 236 - DNA, 20 bp, synthetic construct
  source 1..20: mol_type = other DNA
aagatacctgaataaccctc

SEQ ID NO: 237 - DNA, 20 bp, synthetic construct
  source 1..20: mol_type = other DNA
aagatacctgaataaccctc

SEQ ID NO: 238 - DNA, 20 bp, synthetic construct
  source 1..20: mol_type = other DNA
aagatacctgaataaccctc

SEQ ID NO: 239 - DNA, 20 bp, synthetic construct
  source 1..20: mol_type = other DNA
aagatacctgaataaccctc

SEQ ID NO: 240 - DNA, 20 bp, synthetic construct
  source 1..20: mol_type = other DNA
aagatacctgaataaccctc

SEQ ID NO: 241 - DNA, 20 bp, synthetic construct
  source 1..20: mol_type = other DNA
aagatacctgaataaccctc

SEQ ID NO: 242 - DNA, 20 bp, synthetic construct
  source 1..20: mol_type = other DNA
aagatacctgaataaccctc

SEQ ID NO: 243 - DNA, 20 bp, synthetic construct
  source 1..20: mol_type = other DNA
aagatacctgaataaccctc

SEQ ID NO: 244 - DNA, 20 bp, synthetic construct
  source 1..20: mol_type = other DNA
aagatacctgaataaccctc

SEQ ID NO: 245 - DNA, 20 bp, synthetic construct
  source 1..20: mol_type = other DNA
aagatacctgaataaccctc

SEQ ID NO: 246 - DNA, 20 bp, synthetic construct
  source 1..20: mol_type = other DNA
aagatacctgaataaccctc

SEQ ID NO: 247 - DNA, 20 bp, synthetic construct
  source 1..20: mol_type = other DNA
aagatacctgaataaccctc

SEQ ID NO: 248 - DNA, 20 bp, synthetic construct
  source 1..20: mol_type = other DNA
aagatacctgaataaccctc

SEQ ID NO: 249 - DNA, 20 bp, synthetic construct
  source 1..20: mol_type = other DNA
aagatacctgaataaccctc

SEQ ID NO: 250 - DNA, 20 bp, synthetic construct
  source 1..20: mol_type = other DNA
aagatacctgaataaccctc

SEQ ID NO: 251 - DNA, 20 bp, synthetic construct
  source 1..20: mol_type = other DNA
aagatacctgaataaccctc

SEQ ID NO: 252 - DNA, 20 bp, synthetic construct
  source 1..20: mol_type = other DNA
aagatacctgaataaccctc

SEQ ID NO: 253 - DNA, 20 bp, synthetic construct
  source 1..20: mol_type = other DNA
aagatacctgaataaccctc

SEQ ID NO: 254 - DNA, 20 bp, synthetic construct
  source 1..20: mol_type = other DNA
aagatacctgaataaccctc

SEQ ID NO: 255 - DNA, 20 bp, synthetic construct
  source 1..20: mol_type = other DNA
aagatacctgaataaccctc

SEQ ID NO: 256 - DNA, 20 bp, synthetic construct
  source 1..20: mol_type = other DNA
aagatacctgaataaccctc

SEQ ID NO: 257 - DNA, 20 bp, synthetic construct
  source 1..20: mol_type = other DNA
aagatacctgaataaccctc

SEQ ID NO: 258 - DNA, 20 bp, synthetic construct
  source 1..20: mol_type = other DNA
aagatacctgaataaccctc

SEQ ID NO: 259 - DNA, 20 bp, synthetic construct
  source 1..20: mol_type = other DNA
aagatacctgaataaccctc

SEQ ID NO: 260 - DNA, 20 bp, synthetic construct
  source 1..20: mol_type = other DNA
aagatacctgaataactctc

SEQ ID NO: 261 - DNA, 20 bp, synthetic construct
  source 1..20: mol_type = other DNA
aagatacctgaataactctc

SEQ ID NO: 262 - DNA, 20 bp, synthetic construct
  source 1..20: mol_type = other DNA
aagatacctgaataactctc

SEQ ID NO: 263 - DNA, 20 bp, synthetic construct
  source 1..20: mol_type = other DNA
aagatacctgaataactctc

SEQ ID NO: 264 - DNA, 20 bp, synthetic construct
  source 1..20: mol_type = other DNA
aagatacctgaataactctc

SEQ ID NO: 265 - DNA, 20 bp, synthetic construct
  source 1..20: mol_type = other DNA
aagatacctgaataactctc

SEQ ID NO: 266 - DNA, 20 bp, synthetic construct
  source 1..20: mol_type = other DNA
aagatacctgaataactctc

SEQ ID NO: 267 - DNA, 20 bp, synthetic construct
  source 1..20: mol_type = other DNA
aagatacctgaataactctc

SEQ ID NO: 268 - DNA, 20 bp, synthetic construct
  source 1..20: mol_type = other DNA
aagatacctgaataactctc

SEQ ID NO: 269 - DNA, 20 bp, synthetic construct
  source 1..20: mol_type = other DNA
aagatacctgaataactctc

SEQ ID NO: 270 - DNA, 20 bp, synthetic construct
  source 1..20: mol_type = other DNA
aagatacctgaataactctc

SEQ ID NO: 271 - DNA, 20 bp, synthetic construct
  source 1..20: mol_type = other DNA
aagatacctgaataactctc

SEQ ID NO: 272 - DNA, 20 bp, synthetic construct
  source 1..20: mol_type = other DNA
aagatacctgaataactctc

SEQ ID NO: 273 - DNA, 20 bp, synthetic construct
  source 1..20: mol_type = other DNA
aagatacctgaataactctc

SEQ ID NO: 274 - DNA, 20 bp, synthetic construct
  source 1..20: mol_type = other DNA
aagatacctgaataactctc

SEQ ID NO: 275 - DNA, 20 bp, synthetic construct
  source 1..20: mol_type = other DNA
aagatacctgaataactctc

SEQ ID NO: 276 - DNA, 20 bp, synthetic construct
  source 1..20: mol_type = other DNA
aagatacctgaataactctc

SEQ ID NO: 277 - DNA, 20 bp, synthetic construct
  source 1..20: mol_type = other DNA
aagatacctgaataactctc

SEQ ID NO: 278 - DNA, 20 bp, synthetic construct
  source 1..20: mol_type = other DNA
aagatacctgaataactctc

SEQ ID NO: 279 - DNA, 20 bp, synthetic construct
  source 1..20: mol_type = other DNA
aagatacctgaataactctc

SEQ ID NO: 280 - DNA, 20 bp, synthetic construct
  source 1..20: mol_type = other DNA
aagatacctgaataactctc

SEQ ID NO: 281 - DNA, 20 bp, synthetic construct
  source 1..20: mol_type = other DNA
aagatacctgaataactctc

SEQ ID NO: 282 - DNA, 20 bp, synthetic construct
  source 1..20: mol_type = other DNA
aagatacctgaataactctc

SEQ ID NO: 283 - DNA, 20 bp, synthetic construct
  source 1..20: mol_type = other DNA
aagatacctgaataactctc

SEQ ID NO: 284 - DNA, 20 bp, synthetic construct
  source 1..20: mol_type = other DNA
aagatacctgaataactctc

SEQ ID NO: 285 - DNA, 20 bp, synthetic construct
  source 1..20: mol_type = other DNA
aagatacctgaataactctc

SEQ ID NO: 286 - DNA, 20 bp, synthetic construct
  source 1..20: mol_type = other DNA
aagatacctgaataactctc

SEQ ID NO: 287 - DNA, 20 bp, synthetic construct
  source 1..20: mol_type = other DNA
aagatacctgaataactctc

SEQ ID NO: 288 - DNA, 20 bp, synthetic construct
  source 1..20: mol_type = other DNA
aagatacctgaataactctc

SEQ ID NO: 289 - DNA, 20 bp, synthetic construct
  source 1..20: mol_type = other DNA
aagatacctgaataactctc

SEQ ID NO: 290 - DNA, 20 bp, synthetic construct
  source 1..20: mol_type = other DNA
aagatacctgaataactctc

SEQ ID NO: 291 - DNA, 20 bp, synthetic construct
  source 1..20: mol_type = other DNA
aagatacctgaataactctc

SEQ ID NO: 292 - DNA, 20 bp, synthetic construct
  source 1..20: mol_type = other DNA
aagatacctgaataactctc

SEQ ID NO: 293 - DNA, 20 bp, synthetic construct
  source 1..20: mol_type = other DNA
aagatacctgaataactctc

SEQ ID NO: 294 - DNA, 20 bp, synthetic construct
  source 1..20: mol_type = other DNA
aagatacctgaataactctc

SEQ ID NO: 295 - DNA, 20 bp, synthetic construct
  source 1..20: mol_type = other DNA
aagatacctgaataactctc

SEQ ID NO: 296 - DNA, 20 bp, synthetic construct
  source 1..20: mol_type = other DNA
aagatacctgaataactctc

SEQ ID NO: 297 - DNA, 20 bp, synthetic construct
  source 1..20: mol_type = other DNA
aagatacctgaataactctc

SEQ ID NO: 298 - DNA, 20 bp, synthetic construct
  source 1..20: mol_type = other DNA
aagatacctgaataactctc

SEQ ID NO: 299 - DNA, 20 bp, synthetic construct
  source 1..20: mol_type = other DNA
aagatacctgaataactctc

SEQ ID NO: 300 - DNA, 20 bp, synthetic construct
  source 1..20: mol_type = other DNA
aagatacctgaataactctc

SEQ ID NO: 301 - DNA, 20 bp, synthetic construct
  source 1..20: mol_type = other DNA
aagatacctgaataactctc

SEQ ID NO: 302 - DNA, 20 bp, synthetic construct
  source 1..20: mol_type = other DNA
aagatacctgaataactctc

SEQ ID NO: 303 - DNA, 20 bp, synthetic construct
  source 1..20: mol_type = other DNA
aagatacctgaataactctc

SEQ ID NO: 304 - DNA, 20 bp, synthetic construct
  source 1..20: mol_type = other DNA
aagatacctgaataactctc

SEQ ID NO: 305 - DNA, 20 bp, synthetic construct
  source 1..20: mol_type = other DNA
aagatacctgaataactctc

SEQ ID NO: 306 - DNA, 20 bp, synthetic construct
  source 1..20: mol_type = other DNA
aagatacctgaataactctc

SEQ ID NO: 307 - DNA, 20 bp, synthetic construct
  source 1..20: mol_type = other DNA
aagatacctgaataaccctc

SEQ ID NO: 308 - DNA, 20 bp, synthetic construct
  source 1..20: mol_type = other DNA
aagatacctgaataaccctc

SEQ ID NO: 309 - DNA, 20 bp, synthetic construct
  source 1..20: mol_type = other DNA
aagatacctgaataaccctc

SEQ ID NO: 310 - DNA, 20 bp, synthetic construct
  source 1..20: mol_type = other DNA
aagatacctgaataaccctc

SEQ ID NO: 311 - DNA, 20 bp, synthetic construct
  source 1..20: mol_type = other DNA
aagatacctgaataaccctc

SEQ ID NO: 312 - DNA, 20 bp, synthetic construct
  source 1..20: mol_type = other DNA
aagatacctgaataaccctc

SEQ ID NO: 313 - DNA, 20 bp, synthetic construct
  source 1..20: mol_type = other DNA
aagatacctgaataaccctc

SEQ ID NO: 314 - DNA, 20 bp, synthetic construct
  source 1..20: mol_type = other DNA
aagatacctgaataaccctc

SEQ ID NO: 315 - DNA, 20 bp, synthetic construct
  source 1..20: mol_type = other DNA
aagatacctgaataaccctc

SEQ ID NO: 316 - DNA, 20 bp, synthetic construct
  source 1..20: mol_type = other DNA
aagatacctgaataaccctc

SEQ ID NO: 317 - DNA, 20 bp, synthetic construct
  source 1..20: mol_type = other DNA
aagatacctgaataaccctc

SEQ ID NO: 318 - DNA, 20 bp, synthetic construct
  source 1..20: mol_type = other DNA
aagatacctgaataaccctc

SEQ ID NO: 319 - DNA, 20 bp, synthetic construct
  source 1..20: mol_type = other DNA
aagatacctgaataaccctc

SEQ ID NO: 320 - DNA, 20 bp, synthetic construct
  source 1..20: mol_type = other DNA
aagatacctgaataaccctc

SEQ ID NO: 321 - DNA, 20 bp, synthetic construct
  source 1..20: mol_type = other DNA
aagatacctgaataaccctc

SEQ ID NO: 322 - DNA, 20 bp, synthetic construct
  source 1..20: mol_type = other DNA
aagatacctgaataaccctc

SEQ ID NO: 323 - DNA, 20 bp, synthetic construct
  source 1..20: mol_type = other DNA
aagatacctgaataaccctc

SEQ ID NO: 324 - DNA, 20 bp, synthetic construct
  source 1..20: mol_type = other DNA
aagatacctgaataaccctc

SEQ ID NO: 325 - DNA, 20 bp, synthetic construct
  source 1..20: mol_type = other DNA
aagatacctgaataaccctc

SEQ ID NO: 326 - DNA, 20 bp, synthetic construct
  source 1..20: mol_type = other DNA
aagatacctgaataaccctc

SEQ ID NO: 327 - DNA, 20 bp, synthetic construct
  source 1..20: mol_type = other DNA
aagatacctgaataaccctc

SEQ ID NO: 328 - DNA, 20 bp, synthetic construct
  source 1..20: mol_type = other DNA
aagatacctgaataaccctc

SEQ ID NO: 329 - DNA, 20 bp, synthetic construct
  source 1..20: mol_type = other DNA
aagatacctgaataaccctc

SEQ ID NO: 330 - DNA, 20 bp, synthetic construct
  source 1..20: mol_type = other DNA
aagatacctgaataaccctc

SEQ ID NO: 331 - DNA, 20 bp, synthetic construct
  source 1..20: mol_type = other DNA
aagatacctgaataaccctc

SEQ ID NO: 332 - DNA, 20 bp, synthetic construct
  source 1..20: mol_type = other DNA
aagatacctgaataaccctc

SEQ ID NO: 333 - DNA, 20 bp, synthetic construct
  source 1..20: mol_type = other DNA
aagatacctgaataaccctc

SEQ ID NO: 334 - DNA, 20 bp, synthetic construct
  source 1..20: mol_type = other DNA
aagatacctgaataaccctc

SEQ ID NO: 335 - DNA, 20 bp, synthetic construct
  source 1..20: mol_type = other DNA
aagatacctgaataaccctc

SEQ ID NO: 336 - DNA, 20 bp, synthetic construct
  source 1..20: mol_type = other DNA
aagatacctgaataaccctc

SEQ ID NO: 337 - DNA, 20 bp, synthetic construct
  source 1..20: mol_type = other DNA
aagatacctgaataaccctc

SEQ ID NO: 338 - DNA, 20 bp, synthetic construct
  source 1..20: mol_type = other DNA
aagatacctgaataaccctc

SEQ ID NO: 339 - DNA, 20 bp, synthetic construct
  source 1..20: mol_type = other DNA
aagatacctgaataaccctc

SEQ ID NO: 340 - DNA, 20 bp, synthetic construct
  source 1..20: mol_type = other DNA
aagatacctgaataaccctc

SEQ ID NO: 341 - DNA, 20 bp, synthetic construct
  source 1..20: mol_type = other DNA
aagatacctgaataaccctc

SEQ ID NO: 342 - DNA, 20 bp, synthetic construct
  source 1..20: mol_type = other DNA
aagatacctgaataaccctc

SEQ ID NO: 343 - DNA, 20 bp, synthetic construct
  source 1..20: mol_type = other DNA
aagatacctgaataaccctc

SEQ ID NO: 344 - DNA, 20 bp, synthetic construct
  source 1..20: mol_type = other DNA
aagatacctgaataaccctc

SEQ ID NO: 345 - DNA, 20 bp, synthetic construct
  source 1..20: mol_type = other DNA
aagatacctgaataaccctc

SEQ ID NO: 346 - DNA, 20 bp, synthetic construct
  source 1..20: mol_type = other DNA
aagatacctgaataaccctc

SEQ ID NO: 347 - DNA, 20 bp, synthetic construct
  source 1..20: mol_type = other DNA
aagatacctgaataaccctc

SEQ ID NO: 348 - DNA, 20 bp, synthetic construct
  source 1..20: mol_type = other DNA
aagatacctgaataaccctc

SEQ ID NO: 349 - DNA, 20 bp, synthetic construct
  source 1..20: mol_type = other DNA
aagatacctgaataaccctc

SEQ ID NO: 350 - DNA, 20 bp, synthetic construct
  source 1..20: mol_type = other DNA
aagatacctgaataaccctc

SEQ ID NO: 351 - DNA, 20 bp, synthetic construct
  source 1..20: mol_type = other DNA
aagatacctgaataaccctc

SEQ ID NO: 352 - DNA, 20 bp, synthetic construct
  source 1..20: mol_type = other DNA
aagatacctgaataaccctc

SEQ ID NO: 353 - DNA, 20 bp, synthetic construct
  source 1..20: mol_type = other DNA
aagatacctgaataaccctc

SEQ ID NO: 354 - DNA, 20 bp, synthetic construct
  source 1..20: mol_type = other DNA
aagatacctgaataaccctc

SEQ ID NO: 355 - DNA, 20 bp, synthetic construct
  source 1..20: mol_type = other DNA
aagatacctgaataaccctc

SEQ ID NO: 356 - DNA, 20 bp, synthetic construct
  source 1..20: mol_type = other DNA
aagatacctgaataaccctc

SEQ ID NO: 357 - DNA, 20 bp, synthetic construct
  source 1..20: mol_type = other DNA
aagatacctgaataaccctc

SEQ ID NO: 358 - DNA, 20 bp, synthetic construct
  source 1..20: mol_type = other DNA
aagatacctgaataaccctc

SEQ ID NO: 359 - DNA, 20 bp, synthetic construct
  source 1..20: mol_type = other DNA
aagatacctgaataaccctc

SEQ ID NO: 360 - DNA, 20 bp, synthetic construct
  source 1..20: mol_type = other DNA
aagatacctgaataaccctc

SEQ ID NO: 361 - DNA, 20 bp, synthetic construct
  source 1..20: mol_type = other DNA
aagatacctgaataaccctc

SEQ ID NO: 362 - DNA, 20 bp, synthetic construct
  source 1..20: mol_type = other DNA
aagatacctgaataaccctc

SEQ ID NO: 363 - DNA, 20 bp, synthetic construct
  source 1..20: mol_type = other DNA
aagatacctgaataaccctc

SEQ ID NO: 364 - DNA, 20 bp, synthetic construct
  source 1..20: mol_type = other DNA
aagatacctgaataaccctc

SEQ ID NO: 365 - DNA, 20 bp, synthetic construct
  source 1..20: mol_type = other DNA
aagatacctgaataaccctc

SEQ ID NO: 366 - DNA, 20 bp, synthetic construct
  source 1..20: mol_type = other DNA
aagatacctgaataaccctc

SEQ ID NO: 367 - DNA, 20 bp, synthetic construct
  source 1..20: mol_type = other DNA
aagatacctgaataaccctc

SEQ ID NO: 368 - DNA, 20 bp, synthetic construct
  source 1..20: mol_type = other DNA
aagatacctgaataaccctc

SEQ ID NO: 369 - DNA, 20 bp, synthetic construct
  source 1..20: mol_type = other DNA
aagatacctgaataaccctc

SEQ ID NO: 370 - DNA, 20 bp, synthetic construct
  source 1..20: mol_type = other DNA
aagatacctgaataaccctc

SEQ ID NO: 371 - DNA, 20 bp, synthetic construct
  source 1..20: mol_type = other DNA
aagatacctgaataaccctc

SEQ ID NO: 372 - DNA, 20 bp, synthetic construct
  source 1..20: mol_type = other DNA
aagatacctgaataaccctc

SEQ ID NO: 373 - DNA, 20 bp, synthetic construct
  source 1..20: mol_type = other DNA
aagatacctgaataaccctc

SEQ ID NO: 374 - DNA, 20 bp, synthetic construct
  source 1..20: mol_type = other DNA
aagatacctgaataaccctc

SEQ ID NO: 375 - DNA, 20 bp, synthetic construct
  source 1..20: mol_type = other DNA
aagatacctgaataaccctc

SEQ ID NO: 376 - DNA, 20 bp, synthetic construct
  source 1..20: mol_type = other DNA
aagatacctgaataaccctc

SEQ ID NO: 377 - DNA, 20 bp, synthetic construct
  source 1..20: mol_type = other DNA
aagatacctgaataaccctc

SEQ ID NO: 378 - DNA, 20 bp, synthetic construct
  source 1..20: mol_type = other DNA
aagatacctgaataaccctc

SEQ ID NO: 379 - DNA, 20 bp, synthetic construct
  source 1..20: mol_type = other DNA
aagatacctgaataaccctc

SEQ ID NO: 380 - DNA, 20 bp, synthetic construct
  source 1..20: mol_type = other DNA
aagatacctgaataaccctc

SEQ ID NO: 381 - DNA, 20 bp, synthetic construct
  source 1..20: mol_type = other DNA
aagatacctgaataaccctc

SEQ ID NO: 382 - DNA, 20 bp, synthetic construct
  source 1..20: mol_type = other DNA
aagatacctgaataaccctc

SEQ ID NO: 383 - DNA, 20 bp, synthetic construct
  source 1..20: mol_type = other DNA
aagatacctgaataaccctc

SEQ ID NO: 384 - DNA, 20 bp, synthetic construct
  source 1..20: mol_type = other DNA
aagatacctgaataaccctc

SEQ ID NO: 385 - DNA, 20 bp, synthetic construct
  source 1..20: mol_type = other DNA
aagatacctgaataaccctc

SEQ ID NO: 386 - DNA, 20 bp, synthetic construct
  source 1..20: mol_type = other DNA
aagatacctgaataaccctc

SEQ ID NO: 387 - DNA, 25 bp, synthetic construct
  source 1..25: mol_type = other DNA
agaaaaagatacctgaataactctc

SEQ ID NO: 388 - DNA, 27 bp, synthetic construct
  source 1..27: mol_type = other DNA
tcagaaaaagatacctgaataactctc

SEQ ID NO: 389 - DNA, 20 bp, synthetic construct
  source 1..20: mol_type = other DNA
aagatacctgaataaccctc

SEQ ID NO: 390 - DNA, 20 bp, synthetic construct
  source 1..20: mol_type = other DNA
aagatacctgaataaccctc

SEQ ID NO: 391 - DNA, 20 bp, synthetic construct
  source 1..20: mol_type = other DNA
aagatacctgaataaccctc

SEQ ID NO: 392 - DNA, 20 bp, synthetic construct
  source 1..20: mol_type = other DNA
aagatacctgaataactctc

SEQ ID NO: 393 - DNA, 20 bp, synthetic construct
  source 1..20: mol_type = other DNA
aagatacctgaataactctc

SEQ ID NO: 394 - DNA, 20 bp, synthetic construct
  source 1..20: mol_type = other DNA
aagatacctgaataactctc

SEQ ID NO: 395 - DNA, 20 bp, synthetic construct
  source 1..20: mol_type = other DNA
aagatacctgaataactctc

SEQ ID NO: 396 - DNA, 20 bp, synthetic construct
  source 1..20: mol_type = other DNA
aagatacctgaataactctc

SEQ ID NO: 397 - DNA, 20 bp, synthetic construct
  source 1..20: mol_type = other DNA
aagatacctgaataactctc

SEQ ID NO: 398 - DNA, 20 bp, synthetic construct
  source 1..20: mol_type = other DNA
aagatacctgaataactctc

SEQ ID NO: 399 - DNA, 20 bp, synthetic construct
  source 1..20: mol_type = other DNA
aagatacctgaataactctc

SEQ ID NO: 400 - DNA, 20 bp, synthetic construct
  source 1..20: mol_type = other DNA
aagatacctgaataactctc

SEQ ID NO: 401 - DNA, 20 bp, synthetic construct
  source 1..20: mol_type = other DNA
aagatacctgaataactctc

SEQ ID NO: 402 - DNA, 20 bp, synthetic construct
  source 1..20: mol_type = other DNA
aagatacctgaataactctc

SEQ ID NO: 403 - DNA, 20 bp, synthetic construct
  source 1..20: mol_type = other DNA
aagatacctgaataactctc

SEQ ID NO: 404 - DNA, 20 bp, synthetic construct
  source 1..20: mol_type = other DNA
aagatacctgaataactctc

SEQ ID NO: 405 - DNA, 20 bp, synthetic construct
  source 1..20: mol_type = other DNA
aagatacctgaataactctc

SEQ ID NO: 406 - DNA, 20 bp, synthetic construct
  source 1..20: mol_type = other DNA
aagatacctgaataactctc

SEQ ID NO: 407 - DNA, 20 bp, synthetic construct
  source 1..20: mol_type = other DNA
aagatacctgaataactctc

SEQ ID NO: 408 - DNA, 20 bp, synthetic construct
  source 1..20: mol_type = other DNA
aagatacctgaataactctc

SEQ ID NO: 409 - DNA, 20 bp, synthetic construct
  source 1..20: mol_type = other DNA
aagatacctgaataactctc

SEQ ID NO: 410 - DNA, 20 bp, synthetic construct
  source 1..20: mol_type = other DNA
aagatacctgaataactctc

SEQ ID NO: 411 - DNA, 20 bp, synthetic construct
  source 1..20: mol_type = other DNA
aagatacctgaataactctc

SEQ ID NO: 412 - DNA, 20 bp, synthetic construct
  source 1..20: mol_type = other DNA
aagatacctgaataactctc

SEQ ID NO: 413 - DNA, 20 bp, synthetic construct
  source 1..20: mol_type = other DNA
aagatacctgaataactctc

SEQ ID NO: 414 - DNA, 20 bp, synthetic construct
  source 1..20: mol_type = other DNA
aagatacctgaataactctc

SEQ ID NO: 415 - DNA, 20 bp, synthetic construct
  source 1..20: mol_type = other DNA
aagatacctgaataactctc

SEQ ID NO: 416 - DNA, 20 bp, synthetic construct
  source 1..20: mol_type = other DNA
aagatacctgaataactctc

SEQ ID NO: 417 - DNA, 20 bp, synthetic construct
  source 1..20: mol_type = other DNA
aagatacctgaataactctc

SEQ ID NO: 418 - DNA, 20 bp, synthetic construct
  source 1..20: mol_type = other DNA
aagatacctgaataactctc

SEQ ID NO: 419 - DNA, 20 bp, synthetic construct
  source 1..20: mol_type = other DNA
aagatacctgaataactctc

SEQ ID NO: 420 - DNA, 20 bp, synthetic construct
  source 1..20: mol_type = other DNA
aagatacctgaataactctc

SEQ ID NO: 421 - DNA, 20 bp, synthetic construct
  source 1..20: mol_type = other DNA
aagatacctgaataactctc

SEQ ID NO: 422 - DNA, 20 bp, synthetic construct
  source 1..20: mol_type = other DNA
aagatacctgaataactctc

SEQ ID NO: 423 - DNA, 20 bp, synthetic construct
  source 1..20: mol_type = other DNA
aagatacctgaataactctc

SEQ ID NO: 424 - DNA, 20 bp, synthetic construct
  source 1..20: mol_type = other DNA
aagatacctgaataactctc

SEQ ID NO: 425 - DNA, 21 bp, synthetic construct
  source 1..21: mol_type = other DNA
aaagatacctgaataaccctc

SEQ ID NO: 426 - DNA, 22 bp, synthetic construct
  source 1..22: mol_type = other DNA
aaaagatacctgaataaccctc

SEQ ID NO: 427 - DNA, 23 bp, synthetic construct
  source 1..23: mol_type = other DNA
aaaaagatacctgaataaccctc

SEQ ID NO: 428 - DNA, 24 bp, synthetic construct
  source 1..24: mol_type = other DNA
gaaaaagatacctgaataaccctc

SEQ ID NO: 429 - DNA, 25 bp, synthetic construct
  source 1..25: mol_type = other DNA
agaaaaagatacctgaataaccctc

SEQ ID NO: 430 - DNA, 27 bp, synthetic construct
  source 1..27: mol_type = other DNA
tcagaaaaagatacctgaataaccctc

SEQ ID NO: 431 - DNA, 29 bp, synthetic construct
  source 1..29: mol_type = other DNA
tatcagaaaaagatacctgaataaccctc

SEQ ID NO: 432 - RNA, 103 nt, synthetic construct
  source 1..103: mol_type = other RNA
  modified_base 1..3: mod_base = OTHER; note = 2'-O-methyl ribonucleotide
  modified_base 21: mod_base = OTHER; note = 2'-O-methyl ribonucleotide
  modified_base 28..32: mod_base = OTHER; note = 2'-O-methyl ribonucleotide
  modified_base 34..42: mod_base = OTHER; note = 2'-O-methyl ribonucleotide
  modified_base 46: mod_base = OTHER; note = 2'-O-methyl ribonucleotide
  modified_base 48: mod_base = OTHER; note = 2'-O-methyl ribonucleotide
  modified_base 50: mod_base = OTHER; note = 2'-O-methyl ribonucleotide
  modified_base 52..57: mod_base = OTHER; note = 2'-O-methyl ribonucleotide
  modified_base 60..61: mod_base = OTHER; note = 2'-O-methyl ribonucleotide
  modified_base 66..67: mod_base = OTHER; note = 2'-O-methyl ribonucleotide
  modified_base 70..72: mod_base = OTHER; note = 2'-O-methyl ribonucleotide
  modified_base 74..81: mod_base = OTHER; note = 2'-O-methyl ribonucleotide
  modified_base 83..97: mod_base = OTHER; note = 2'-O-methyl ribonucleotide
  modified_base 1..4: mod_base = OTHER; note = phosphorothioate linkage
  modified_base 97..100: mod_base = OTHER; note = phosphorothioate linkage
  modified_base 103: mod_base = OTHER; note = phosphorothioate linkage
aagatacctgaataactctcgttttagagctagaaatagcaagttaaaataaggctagtccgttatcaacttgaaaaagtggcaccgagtcggtgcttttttt

SEQ ID NO: 433 - DNA, 100 bp, synthetic construct; identical to SEQ ID NO: 72
  source 1..100: mol_type = other DNA
  modified_base 1..3: mod_base = OTHER; note = 2'-O-methyl ribonucleotide
  modified_base 21: mod_base = OTHER; note = 2'-O-methyl ribonucleotide
  modified_base 28..32: mod_base = OTHER; note = 2'-O-methyl ribonucleotide
  modified_base 34..42: mod_base = OTHER; note = 2'-O-methyl ribonucleotide
  modified_base 46: mod_base = OTHER; note = 2'-O-methyl ribonucleotide
  modified_base 48: mod_base = OTHER; note = 2'-O-methyl ribonucleotide
  modified_base 50: mod_base = OTHER; note = 2'-O-methyl ribonucleotide
  modified_base 52..57: mod_base = OTHER; note = 2'-O-methyl ribonucleotide
  modified_base 60..61: mod_base = OTHER; note = 2'-O-methyl ribonucleotide
  modified_base 66..67: mod_base = OTHER; note = 2'-O-methyl ribonucleotide
  modified_base 70..72: mod_base = OTHER; note = 2'-O-methyl ribonucleotide
  modified_base 74..81: mod_base = OTHER; note = 2'-O-methyl ribonucleotide
  modified_base 83..100: mod_base = OTHER; note = 2'-O-methyl ribonucleotide
  modified_base 1..4: mod_base = OTHER; note = phosphorothioate linkage
  modified_base 97..100: mod_base = OTHER; note = phosphorothioate linkage
  misc_feature 1..4: note = RNA
  misc_feature 5: note = DNA
  misc_feature 6: note = RNA
  misc_feature 7: note = DNA
  misc_feature 8: note = RNA
  misc_feature 9: note = DNA
  misc_feature 10: note = RNA
  misc_feature 11: note = DNA
  misc_feature 12: note = RNA
  misc_feature 13: note = DNA
  misc_feature 14: note = RNA
  misc_feature 15: note = DNA
  misc_feature 16: note = RNA
  misc_feature 17: note = DNA
  misc_feature 18: note = RNA
  misc_feature 19: note = DNA
  misc_feature 20..100: note = RNA

SEQ ID NO: 434 - DNA, 100 bp, synthetic construct; identical to SEQ ID NO: 72
  source 1..100: mol_type = other DNA
  modified_base 1..3: mod_base = OTHER; note = 2'-O-methyl ribonucleotide
  modified_base 21: mod_base = OTHER; note = 2'-O-methyl ribonucleotide
  modified_base 28..32: mod_base = OTHER; note = 2'-O-methyl ribonucleotide
  modified_base 34..42: mod_base = OTHER; note = 2'-O-methyl ribonucleotide
  modified_base 46: mod_base = OTHER; note = 2'-O-methyl ribonucleotide
  modified_base 48: mod_base = OTHER; note = 2'-O-methyl ribonucleotide
  modified_base 50: mod_base = OTHER; note = 2'-O-methyl ribonucleotide
  modified_base 52..57: mod_base = OTHER; note = 2'-O-methyl ribonucleotide
  modified_base 60..61: mod_base = OTHER; note = 2'-O-methyl ribonucleotide
  modified_base 66..67: mod_base = OTHER; note = 2'-O-methyl ribonucleotide
  modified_base 70..72: mod_base = OTHER; note = 2'-O-methyl ribonucleotide
  modified_base 74..81: mod_base = OTHER; note = 2'-O-methyl ribonucleotide
  modified_base 83..100: mod_base = OTHER; note = 2'-O-methyl ribonucleotide
  modified_base 1..4: mod_base = OTHER; note = phosphorothioate linkage
  modified_base 97..100: mod_base = OTHER; note = phosphorothioate linkage
  misc_feature 1..3: note = RNA
  misc_feature 4: note = DNA
  misc_feature 5: note = RNA
  misc_feature 6: note = DNA
  misc_feature 7: note = RNA
  misc_feature 8: note = DNA
  misc_feature 9: note = RNA
  misc_feature 10: note = DNA
  misc_feature 11: note = RNA
  misc_feature 12: note = DNA
  misc_feature 13: note = RNA
  misc_feature 14: note = DNA
  misc_feature 15: note = RNA
  misc_feature 16: note = DNA
  misc_feature 17: note = RNA
  misc_feature 18: note = DNA
  misc_feature 19: note = RNA
  misc_feature 20: note = DNA
  misc_feature 21..100: note = RNA

SEQ ID NO: 435 - DNA, 100 bp, synthetic construct; identical to SEQ ID NO: 72
  source 1..100: mol_type = other DNA
  modified_base 1..2: mod_base = OTHER; note = 2'-O-methyl ribonucleotide
  modified_base 21: mod_base = OTHER; note = 2'-O-methyl ribonucleotide
  modified_base 28..32: mod_base = OTHER; note = 2'-O-methyl ribonucleotide
  modified_base 34..42: mod_base = OTHER; note = 2'-O-methyl ribonucleotide
  modified_base 46: mod_base = OTHER; note = 2'-O-methyl ribonucleotide
  modified_base 48: mod_base = OTHER; note = 2'-O-methyl ribonucleotide
  modified_base 50: mod_base = OTHER; note = 2'-O-methyl ribonucleotide
  modified_base 52..57: mod_base = OTHER; note = 2'-O-methyl ribonucleotide
  modified_base 60..61: mod_base = OTHER; note = 2'-O-methyl ribonucleotide
  modified_base 66..67: mod_base = OTHER; note = 2'-O-methyl ribonucleotide
  modified_base 70..72: mod_base = OTHER; note = 2'-O-methyl ribonucleotide
  modified_base 74..81: mod_base = OTHER; note = 2'-O-methyl ribonucleotide
  modified_base 83..100: mod_base = OTHER; note = 2'-O-methyl ribonucleotide
  modified_base 1..4: mod_base = OTHER; note = phosphorothioate linkage
  modified_base 97..100: mod_base = OTHER; note = phosphorothioate linkage
  misc_feature 1..2: note = RNA
  misc_feature 3..6: note = DNA
  misc_feature 7: note = RNA
  misc_feature 8: note = DNA
  misc_feature 9: note = RNA
  misc_feature 10: note = DNA
  misc_feature 11: note = RNA
  misc_feature 12: note = DNA
  misc_feature 13: note = RNA
  misc_feature 14: note = DNA
  misc_feature 15: note = RNA
  misc_feature 16: note = DNA
  misc_feature 17: note = RNA
  misc_feature 18: note = DNA
  misc_feature 19: note = RNA
  misc_feature 20: note = DNA
  misc_feature 21..100: note = RNA

SEQ ID NO: 436 - DNA, 100 bp, synthetic construct; identical to SEQ ID NO: 72
  source 1..100: mol_type = other DNA
  modified_base 1..2: mod_base = OTHER; note = 2'-O-methyl ribonucleotide
  modified_base 21: mod_base = OTHER; note = 2'-O-methyl ribonucleotide
  modified_base 28..32: mod_base = OTHER; note = 2'-O-methyl ribonucleotide
  modified_base 34..42: mod_base = OTHER; note = 2'-O-methyl ribonucleotide
  modified_base 46: mod_base = OTHER; note = 2'-O-methyl ribonucleotide
  modified_base 48: mod_base = OTHER; note = 2'-O-methyl ribonucleotide
  modified_base 50: mod_base = OTHER; note = 2'-O-methyl ribonucleotide
  modified_base 52..57: mod_base = OTHER; note = 2'-O-methyl ribonucleotide
  modified_base 60..61: mod_base = OTHER; note = 2'-O-methyl ribonucleotide
  modified_base 66..67: mod_base = OTHER; note = 2'-O-methyl ribonucleotide
  modified_base 70..72: mod_base = OTHER; note = 2'-O-methyl ribonucleotide
  modified_base 74..81: mod_base = OTHER; note = 2'-O-methyl ribonucleotide
  modified_base 83..100: mod_base = OTHER; note = 2'-O-methyl ribonucleotide
  modified_base 1..4: mod_base = OTHER; note = phosphorothioate linkage
  modified_base 97..100: mod_base = OTHER; note = phosphorothioate linkage
  misc_feature 1..2: note = RNA
  misc_feature 3..10: note = DNA
  misc_feature 11: note = RNA
  misc_feature 12: note = DNA
  misc_feature 13: note = RNA
  misc_feature 14: note = DNA
  misc_feature 15: note = RNA
  misc_feature 16: note = DNA
  misc_feature 17: note = RNA
  misc_feature 18: note = DNA
  misc_feature 19: note = RNA
  misc_feature 20: note = DNA
  misc_feature 21..100: note = RNA

SEQ ID NO: 437 - DNA, 100 bp, synthetic construct; identical to SEQ ID NO: 72
  source 1..100: mol_type = other DNA
  modified_base 1..3: mod_base = OTHER; note = 2'-O-methyl ribonucleotide
  modified_base 21: mod_base = OTHER; note = 2'-O-methyl ribonucleotide
  modified_base 28..32: mod_base = OTHER; note = 2'-O-methyl ribonucleotide
  modified_base 34..42: mod_base = OTHER; note = 2'-O-methyl ribonucleotide
  modified_base 46: mod_base = OTHER; note = 2'-O-methyl ribonucleotide
  modified_base 48: mod_base = OTHER; note = 2'-O-methyl ribonucleotide
  modified_base 50: mod_base = OTHER; note = 2'-O-methyl ribonucleotide
  modified_base 52..57: mod_base = OTHER; note = 2'-O-methyl ribonucleotide
  modified_base 60..61: mod_base = OTHER; note = 2'-O-methyl ribonucleotide
  modified_base 66..67: mod_base = OTHER; note = 2'-O-methyl ribonucleotide
  modified_base 70..72: mod_base = OTHER; note = 2'-O-methyl ribonucleotide
  modified_base 74..81: mod_base = OTHER; note = 2'-O-methyl ribonucleotide
  modified_base 83..100: mod_base = OTHER; note = 2'-O-methyl ribonucleotide
  modified_base 1..4: mod_base = OTHER; note = phosphorothioate linkage
  modified_base 97..100: mod_base = OTHER; note = phosphorothioate linkage
  misc_feature 1..3: note = RNA
  misc_feature 4..6: note = DNA
  misc_feature 7..100: note = RNA

SEQ ID NO: 438 - DNA, 100 bp, synthetic construct; identical to SEQ ID NO: 72
  source 1..100: mol_type = other DNA
  modified_base 1..2: mod_base = OTHER; note = 2'-O-methyl ribonucleotide
  modified_base 21: mod_base = OTHER; note = 2'-O-methyl ribonucleotide
  modified_base 28..32: mod_base = OTHER; note = 2'-O-methyl ribonucleotide
  modified_base 34..42: mod_base = OTHER; note = 2'-O-methyl ribonucleotide
  modified_base 46: mod_base = OTHER; note = 2'-O-methyl ribonucleotide
  modified_base 48: mod_base = OTHER; note = 2'-O-methyl ribonucleotide
  modified_base 50: mod_base = OTHER; note = 2'-O-methyl ribonucleotide
  modified_base 52..57: mod_base = OTHER; note = 2'-O-methyl ribonucleotide
  modified_base 60..61: mod_base = OTHER; note = 2'-O-methyl ribonucleotide
  modified_base 66..67: mod_base = OTHER; note = 2'-O-methyl ribonucleotide
  modified_base 70..72: mod_base = OTHER; note = 2'-O-methyl ribonucleotide
  modified_base 74..81: mod_base = OTHER; note = 2'-O-methyl ribonucleotide
  modified_base 83..100: mod_base = OTHER; note = 2'-O-methyl ribonucleotide
  modified_base 1..4: mod_base = OTHER; note = phosphorothioate linkage
  modified_base 97..100: mod_base = OTHER; note = phosphorothioate linkage
  misc_feature 1..2: note = RNA
  misc_feature 3..6: note = DNA
  misc_feature 7..100: note = RNA

SEQ ID NO: 439 - DNA, 100 bp, synthetic construct; identical to SEQ ID NO: 72
  source 1..100: mol_type = other DNA
  modified_base 1..3: mod_base = OTHER; note = 2'-O-methyl ribonucleotide
  modified_base 21: mod_base = OTHER; note = 2'-O-methyl ribonucleotide
  modified_base 28..32: mod_base = OTHER; note = 2'-O-methyl ribonucleotide
  modified_base 34..42: mod_base = OTHER; note = 2'-O-methyl ribonucleotide
  modified_base 46: mod_base = OTHER; note = 2'-O-methyl ribonucleotide
  modified_base 48: mod_base = OTHER; note = 2'-O-methyl ribonucleotide
  modified_base 50: mod_base = OTHER; note = 2'-O-methyl ribonucleotide
  modified_base 52..57: mod_base = OTHER; note = 2'-O-methyl ribonucleotide
  modified_base 60..61: mod_base = OTHER; note = 2'-O-methyl ribonucleotide
  modified_base 66..67: mod_base = OTHER; note = 2'-O-methyl ribonucleotide
  modified_base 70..72: mod_base = OTHER; note = 2'-O-methyl ribonucleotide
  modified_base 74..81: mod_base = OTHER; note = 2'-O-methyl ribonucleotide
  modified_base 83..100: mod_base = OTHER; note = 2'-O-methyl ribonucleotide
  modified_base 1..4: mod_base = OTHER; note = phosphorothioate linkage
  modified_base 97..100: mod_base = OTHER; note = phosphorothioate linkage
  misc_feature 1..3: note = RNA
  misc_feature 4..7: note = DNA
  misc_feature 8..100: note = RNA

SEQ ID NO: 440 - DNA, 100 bp, synthetic construct; identical to SEQ ID NO: 72
  source 1..100: mol_type = other DNA
  modified_base 1..2: mod_base = OTHER; note = 2'-O-methyl ribonucleotide
  modified_base 21: mod_base = OTHER; note = 2'-O-methyl ribonucleotide
  modified_base 28..32: mod_base = OTHER; note = 2'-O-methyl ribonucleotide
  modified_base 34..42: mod_base = OTHER; note = 2'-O-methyl ribonucleotide
  modified_base 46: mod_base = OTHER; note = 2'-O-methyl ribonucleotide
  modified_base 48: mod_base = OTHER; note = 2'-O-methyl ribonucleotide
  modified_base 50: mod_base = OTHER; note = 2'-O-methyl ribonucleotide
  modified_base 52..57: mod_base = OTHER; note = 2'-O-methyl ribonucleotide
  modified_base 60..61: mod_base = OTHER; note = 2'-O-methyl ribonucleotide
  modified_base 66..67: mod_base = OTHER; note = 2'-O-methyl ribonucleotide
  modified_base 70..72: mod_base = OTHER; note = 2'-O-methyl ribonucleotide
  modified_base 74..81: mod_base = OTHER; note = 2'-O-methyl ribonucleotide
  modified_base 83..100: mod_base = OTHER; note = 2'-O-methyl ribonucleotide
  modified_base 1..4: mod_base = OTHER; note = phosphorothioate linkage
  modified_base 97..100: mod_base = OTHER; note = phosphorothioate linkage
  misc_feature 1..2: note = RNA
  misc_feature 3..7: note = DNA
  misc_feature 8..100: note = RNA

SEQ ID NO: 441 - DNA, 100 bp, synthetic construct; identical to SEQ ID NO: 72
  source 1..100: mol_type = other DNA
  modified_base 1..3: mod_base = OTHER; note = 2'-O-methyl ribonucleotide
  modified_base 21: mod_base = OTHER; note = 2'-O-methyl ribonucleotide
  modified_base 28..32: mod_base = OTHER; note = 2'-O-methyl ribonucleotide
  modified_base 34..42: mod_base = OTHER; note = 2'-O-methyl ribonucleotide
  modified_base 46: mod_base = OTHER; note = 2'-O-methyl ribonucleotide
  modified_base 48: mod_base = OTHER; note = 2'-O-methyl ribonucleotide
  modified_base 50: mod_base = OTHER; note = 2'-O-methyl ribonucleotide
  modified_base 52..57: mod_base = OTHER; note = 2'-O-methyl ribonucleotide
  modified_base 60..61: mod_base = OTHER; note = 2'-O-methyl ribonucleotide
  modified_base 66..67: mod_base = OTHER; note = 2'-O-methyl ribonucleotide
  modified_base 70..72: mod_base = OTHER; note = 2'-O-methyl ribonucleotide
  modified_base 74..81: mod_base = OTHER; note = 2'-O-methyl ribonucleotide
  modified_base 83..100: mod_base = OTHER; note = 2'-O-methyl ribonucleotide
  modified_base 1..4: mod_base = OTHER; note = phosphorothioate linkage
  modified_base 97..100: mod_base = OTHER; note = phosphorothioate linkage
  misc_feature 1..3: note = RNA
  misc_feature 4..8: note = DNA
  misc_feature 9..100: note = RNA

SEQ ID NO: 442 - DNA, 100 bp, synthetic construct; identical to SEQ ID NO: 72
  source 1..100: mol_type = other DNA
  modified_base 1..2: mod_base = OTHER; note = 2'-O-methyl ribonucleotide
  modified_base 21: mod_base = OTHER; note = 2'-O-methyl ribonucleotide
  modified_base 28..32: mod_base = OTHER; note = 2'-O-methyl ribonucleotide
  modified_base 34..42: mod_base = OTHER; note = 2'-O-methyl ribonucleotide
  modified_base 46: mod_base = OTHER; note = 2'-O-methyl ribonucleotide
  modified_base 48: mod_base = OTHER; note = 2'-O-methyl ribonucleotide
  modified_base 50: mod_base = OTHER; note = 2'-O-methyl ribonucleotide
  modified_base 52..57: mod_base = OTHER; note = 2'-O-methyl ribonucleotide
  modified_base 60..61: mod_base = OTHER; note = 2'-O-methyl ribonucleotide
  modified_base 66..67: mod_base = OTHER; note = 2'-O-methyl ribonucleotide
  modified_base 70..72: mod_base = OTHER; note = 2'-O-methyl ribonucleotide
  modified_base 74..81: mod_base = OTHER; note = 2'-O-methyl ribonucleotide
  modified_base 83..100: mod_base = OTHER; note = 2'-O-methyl ribonucleotide
  modified_base 1..4: mod_base = OTHER; note = phosphorothioate linkage
  modified_base 97..100: mod_base = OTHER; note = phosphorothioate linkage
  misc_feature 1..2: note = RNA
  misc_feature 3..8: note = DNA
  misc_feature 9..100: note = RNA

SEQ ID NO: 443 - DNA, 100 bp, synthetic construct; identical to SEQ ID NO: 72
  source 1..100: mol_type = other DNA
  modified_base 1..3: mod_base = OTHER; note = 2'-O-methyl ribonucleotide
  modified_base 21: mod_base = OTHER; note = 2'-O-methyl ribonucleotide
  modified_base 28..32: mod_base = OTHER; note = 2'-O-methyl ribonucleotide
  modified_base 34..42: mod_base = OTHER; note = 2'-O-methyl ribonucleotide
  modified_base 46: mod_base = OTHER; note = 2'-O-methyl ribonucleotide
  modified_base 48: mod_base = OTHER; note = 2'-O-methyl ribonucleotide
  modified_base 50: mod_base = OTHER; note = 2'-O-methyl ribonucleotide
  modified_base 52..57: mod_base = OTHER; note = 2'-O-methyl ribonucleotide
  modified_base 60..61: mod_base = OTHER; note = 2'-O-methyl ribonucleotide
  modified_base 66..67: mod_base = OTHER; note = 2'-O-methyl ribonucleotide
  modified_base 70..72: mod_base = OTHER; note = 2'-O-methyl ribonucleotide
  modified_base 74..81: mod_base = OTHER; note = 2'-O-methyl ribonucleotide
  modified_base 83..100: mod_base = OTHER; note = 2'-O-methyl ribonucleotide
  modified_base 1..4: mod_base = OTHER; note = phosphorothioate linkage
  modified_base 97..100: mod_base = OTHER; note = phosphorothioate linkage
  misc_feature 1..3: note = RNA
  misc_feature 4..9: note = DNA
  misc_feature 10..100: note = RNA

SEQ ID NO: 444 - DNA, 100 bp, synthetic construct; identical to SEQ ID NO: 72
  source 1..100: mol_type = other DNA
  modified_base 1..2: mod_base = OTHER; note = 2'-O-methyl ribonucleotide
  modified_base 21: mod_base = OTHER; note = 2'-O-methyl ribonucleotide
  modified_base 28..32: mod_base = OTHER; note = 2'-O-methyl ribonucleotide
  modified_base 34..42: mod_base = OTHER; note = 2'-O-methyl ribonucleotide
  modified_base 46: mod_base = OTHER; note = 2'-O-methyl ribonucleotide
  modified_base 48: mod_base = OTHER; note = 2'-O-methyl ribonucleotide
  modified_base 50: mod_base = OTHER; note = 2'-O-methyl ribonucleotide
  modified_base 52..57: mod_base = OTHER; note = 2'-O-methyl ribonucleotide
  modified_base 60..61: mod_base = OTHER; note = 2'-O-methyl ribonucleotide
  modified_base 66..67: mod_base = OTHER; note = 2'-O-methyl ribonucleotide
  modified_base 70..72: mod_base = OTHER; note = 2'-O-methyl ribonucleotide
  modified_base 74..81: mod_base = OTHER; note = 2'-O-methyl ribonucleotide
  modified_base 83..100: mod_base = OTHER; note = 2'-O-methyl ribonucleotide
  modified_base 1..4: mod_base = OTHER; note = phosphorothioate linkage
  modified_base 97..100: mod_base = OTHER; note = phosphorothioate linkage
  misc_feature 1..2: note = RNA
  misc_feature 3..9: note = DNA
  misc_feature 10..100: note = RNA

SEQ ID NO: 445 - DNA, 100 bp, synthetic construct; identical to SEQ ID NO: 72
  source 1..100: mol_type = other DNA
  modified_base 1..3: mod_base = OTHER; note = 2'-O-methyl ribonucleotide
  modified_base 21: mod_base = OTHER; note = 2'-O-methyl ribonucleotide
  modified_base 28..32: mod_base = OTHER; note = 2'-O-methyl ribonucleotide
  modified_base 34..42: mod_base = OTHER; note = 2'-O-methyl ribonucleotide
  modified_base 46: mod_base = OTHER; note = 2'-O-methyl ribonucleotide
  modified_base 48: mod_base = OTHER; note = 2'-O-methyl ribonucleotide
  modified_base 50: mod_base = OTHER; note = 2'-O-methyl ribonucleotide
  modified_base 52..57: mod_base = OTHER; note = 2'-O-methyl ribonucleotide
  modified_base 60..61: mod_base = OTHER; note = 2'-O-methyl ribonucleotide
  modified_base 66..67: mod_base = OTHER; note = 2'-O-methyl ribonucleotide
  modified_base 70..72: mod_base = OTHER; note = 2'-O-methyl ribonucleotide
  modified_base 74..81: mod_base = OTHER; note = 2'-O-methyl ribonucleotide
  modified_base 83..100: mod_base = OTHER; note = 2'-O-methyl ribonucleotide
  modified_base 1..4: mod_base = OTHER; note = phosphorothioate linkage
  modified_base 97..100: mod_base = OTHER; note = phosphorothioate linkage
  misc_feature 1..3: note = RNA
  misc_feature 4..10: note = DNA
  misc_feature 11..100: note = RNA

SEQ ID NO: 446 - DNA, 100 bp, synthetic construct; identical to SEQ ID NO: 72
  source 1..100: mol_type = other DNA
  modified_base 1..2: mod_base = OTHER; note = 2'-O-methyl ribonucleotide
  modified_base 21: mod_base = OTHER; note = 2'-O-methyl ribonucleotide
  modified_base 28..32: mod_base = OTHER; note = 2'-O-methyl ribonucleotide
  modified_base 34..42: mod_base = OTHER; note = 2'-O-methyl ribonucleotide
  modified_base 46: mod_base = OTHER; note = 2'-O-methyl ribonucleotide
  modified_base 48: mod_base = OTHER; note = 2'-O-methyl ribonucleotide
  modified_base 50: mod_base = OTHER; note = 2'-O-methyl ribonucleotide
  modified_base 52..57: mod_base = OTHER; note = 2'-O-methyl ribonucleotide
  modified_base 60..61: mod_base = OTHER; note = 2'-O-methyl ribonucleotide
  modified_base 66..67: mod_base = OTHER; note = 2'-O-methyl ribonucleotide
  modified_base 70..72: mod_base = OTHER; note = 2'-O-methyl ribonucleotide
  modified_base 74..81: mod_base = OTHER; note = 2'-O-methyl ribonucleotide
  modified_base 83..100: mod_base = OTHER; note = 2'-O-methyl ribonucleotide
  modified_base 1..4: mod_base = OTHER; note = phosphorothioate linkage
  modified_base 97..100: mod_base = OTHER; note = phosphorothioate linkage
  misc_feature 1..2: note = RNA
  misc_feature 3..8: note = DNA
  misc_feature 9..100: note = RNA

SEQ ID NO: 447 - DNA, 100 bp, synthetic construct; identical to SEQ ID NO: 72
  source 1..100: mol_type = other DNA
  modified_base 1..3: mod_base = OTHER; note = 2'-O-methyl ribonucleotide
  modified_base 21: mod_base = OTHER; note = 2'-O-methyl ribonucleotide
  modified_base 28..32: mod_base = OTHER; note = 2'-O-methyl ribonucleotide
  modified_base 34..42: mod_base = OTHER; note = 2'-O-methyl ribonucleotide
  modified_base 46: mod_base = OTHER; note = 2'-O-methyl ribonucleotide
  modified_base 48: mod_base = OTHER; note = 2'-O-methyl ribonucleotide
  modified_base 50: mod_base = OTHER; note = 2'-O-methyl ribonucleotide
  modified_base 52..57: mod_base = OTHER; note = 2'-O-methyl ribonucleotide
  modified_base 60..61: mod_base = OTHER; note = 2'-O-methyl ribonucleotide
  modified_base 66..67: mod_base = OTHER; note = 2'-O-methyl ribonucleotide
  modified_base 70..72: mod_base = OTHER; note = 2'-O-methyl ribonucleotide
  modified_base 74..81: mod_base = OTHER; note = 2'-O-methyl ribonucleotide
  modified_base 83..100: mod_base = OTHER; note = 2'-O-methyl ribonucleotide
  modified_base 1..4: mod_base = OTHER; note = phosphorothioate linkage
  modified_base 97..100: mod_base = OTHER; note = phosphorothioate linkage
  misc_feature 1..5: note = RNA
  misc_feature 6: note = DNA
  misc_feature 7..15: note = RNA
  misc_feature 16: note = DNA
  misc_feature 17..100: note = RNA

SEQ ID NO: 448 - DNA, 100 bp, synthetic construct; identical to SEQ ID NO: 72
  source 1..100: mol_type = other DNA
  modified_base 1..3: mod_base = OTHER; note = 2'-O-methyl ribonucleotide
  modified_base 21: mod_base = OTHER; note = 2'-O-methyl ribonucleotide
  modified_base 28..32: mod_base = OTHER; note = 2'-O-methyl ribonucleotide
  modified_base 34..42: mod_base = OTHER; note = 2'-O-methyl ribonucleotide
  modified_base 46: mod_base = OTHER; note = 2'-O-methyl ribonucleotide
  modified_base 48: mod_base = OTHER; note = 2'-O-methyl ribonucleotide
  modified_base 50: mod_base = OTHER; note = 2'-O-methyl ribonucleotide
  modified_base 52..57: mod_base = OTHER; note = 2'-O-methyl ribonucleotide
  modified_base 60..61: mod_base = OTHER; note = 2'-O-methyl ribonucleotide
  modified_base 66..67: mod_base = OTHER; note = 2'-O-methyl ribonucleotide
  modified_base 70..72: mod_base = OTHER; note = 2'-O-methyl ribonucleotide
  modified_base 74..81: mod_base = OTHER; note = 2'-O-methyl ribonucleotide
  modified_base 83..100: mod_base = OTHER; note = 2'-O-methyl ribonucleotide
  modified_base 1..4: mod_base = OTHER; note = phosphorothioate linkage
  modified_base 97..100: mod_base = OTHER; note = phosphorothioate linkage
  misc_feature 1..9: note = RNA
  misc_feature 10: note = DNA
  misc_feature 11..12: note = RNA
  misc_feature 13: note = DNA
  misc_feature 14..17: note = RNA
  misc_feature 18: note = DNA
  misc_feature 19..100: note = RNA

SEQ ID NO: 449 - DNA, 100 bp, synthetic construct; identical to SEQ ID NO: 72
  source 1..100: mol_type = other DNA
  modified_base 1..3: mod_base = OTHER; note = 2'-O-methyl ribonucleotide
  modified_base 21..100: mod_base = OTHER; note = 2'-O-methyl ribonucleotide
  modified_base 1..4: mod_base = OTHER; note = phosphorothioate linkage
  modified_base 97..100: mod_base = OTHER; note = phosphorothioate linkage
  misc_feature 1..3: note = RNA
  misc_feature 4..7: note = DNA
  misc_feature 8: note = RNA
  misc_feature 9..10: note = DNA
  misc_feature 11..12: note = RNA
  misc_feature 13..14: note = DNA
  misc_feature 15..100: note = RNA

SEQ ID NO: 450 - DNA, 100 bp, synthetic construct; identical to SEQ ID NO: 72
  source 1..100: mol_type = other DNA
  modified_base 1..2: mod_base = OTHER; note = 2'-O-methyl ribonucleotide
  modified_base 21: mod_base = OTHER; note = 2'-O-methyl ribonucleotide
  modified_base 28..32: mod_base = OTHER; note = 2'-O-methyl ribonucleotide
  modified_base 34..42: mod_base = OTHER; note = 2'-O-methyl ribonucleotide
  modified_base 46: mod_base = OTHER; note = 2'-O-methyl ribonucleotide
  modified_base 48: mod_base = OTHER; note = 2'-O-methyl ribonucleotide
  modified_base 50: mod_base = OTHER; note = 2'-O-methyl ribonucleotide
  modified_base 52..57: mod_base = OTHER; note = 2'-O-methyl ribonucleotide
  modified_base 60..61: mod_base = OTHER; note = 2'-O-methyl ribonucleotide
  modified_base 66..67: mod_base = OTHER; note = 2'-O-methyl ribonucleotide
  modified_base 70..72: mod_base = OTHER; note = 2'-O-methyl ribonucleotide
  modified_base 74..81: mod_base = OTHER; note = 2'-O-methyl ribonucleotide
  modified_base 83..100: mod_base = OTHER; note = 2'-O-methyl ribonucleotide
  modified_base 1..4: mod_base = OTHER; note = phosphorothioate linkage
  modified_base 97..100: mod_base = OTHER; note = phosphorothioate linkage
  misc_feature 1..2: note = RNA
  misc_feature 3..4: note = DNA
  misc_feature 5: note = RNA
  misc_feature 6..7: note = DNA
  misc_feature 8..100: note = RNA

SEQ ID NO: 451 - DNA, 100 bp, synthetic construct; identical to SEQ ID NO: 72
  source 1..100: mol_type = other DNA
  modified_base 1..2: mod_base = OTHER; note = 2'-O-methyl ribonucleotide
  modified_base 21: mod_base = OTHER; note = 2'-O-methyl ribonucleotide
  modified_base 28..32: mod_base = OTHER; note = 2'-O-methyl ribonucleotide
  modified_base 34..42: mod_base = OTHER; note = 2'-O-methyl ribonucleotide
  modified_base 46: mod_base = OTHER; note = 2'-O-methyl ribonucleotide
  modified_base 48: mod_base = OTHER; note = 2'-O-methyl ribonucleotide
  modified_base 50: mod_base = OTHER; note = 2'-O-methyl ribonucleotide
  modified_base 52..57: mod_base = OTHER; note = 2'-O-methyl ribonucleotide
  modified_base 60..61: mod_base = OTHER; note = 2'-O-methyl ribonucleotide
  modified_base 66..67: mod_base = OTHER; note = 2'-O-methyl ribonucleotide
  modified_base 70..72: mod_base = OTHER; note = 2'-O-methyl ribonucleotide
  modified_base 74..81: mod_base = OTHER; note = 2'-O-methyl ribonucleotide
  modified_base 83..100: mod_base = OTHER; note = 2'-O-methyl ribonucleotide
  modified_base 1..4: mod_base = OTHER; note = phosphorothioate linkage
  modified_base 97..100: mod_base = OTHER; note = phosphorothioate linkage
  misc_feature 1..2: note = RNA
  misc_feature 3..4: note = DNA
  misc_feature 5: note = RNA
  misc_feature 6..8: note = DNA
  misc_feature 9..100: note = RNA

SEQ ID NO: 452 - DNA, 100 bp, synthetic construct; identical to SEQ ID NO: 72
  source 1..100: mol_type = other DNA
  modified_base 1..3: mod_base = OTHER; note = 2'-O-methyl ribonucleotide
  modified_base 21: mod_base = OTHER; note = 2'-O-methyl ribonucleotide
  modified_base 28..32: mod_base = OTHER; note = 2'-O-methyl ribonucleotide
  modified_base 34..42: mod_base = OTHER; note = 2'-O-methyl ribonucleotide
  modified_base 46: mod_base = OTHER; note = 2'-O-methyl ribonucleotide
  modified_base 48: mod_base = OTHER; note = 2'-O-methyl ribonucleotide
  modified_base 50: mod_base = OTHER; note = 2'-O-methyl ribonucleotide
  modified_base 52..57: mod_base = OTHER; note = 2'-O-methyl ribonucleotide
  modified_base 60..61: mod_base = OTHER; note = 2'-O-methyl ribonucleotide
  modified_base 66..67: mod_base = OTHER; note = 2'-O-methyl ribonucleotide
  modified_base 70..72: mod_base = OTHER; note = 2'-O-methyl ribonucleotide
  modified_base 74..81: mod_base = OTHER; note = 2'-O-methyl ribonucleotide
  modified_base 83..100: mod_base = OTHER; note = 2'-O-methyl ribonucleotide
  modified_base 1..4: mod_base = OTHER; note = phosphorothioate linkage
  modified_base 97..100: mod_base = OTHER; note = phosphorothioate linkage
  misc_feature 1..2: note = RNA
  misc_feature 3..4: note = DNA
  misc_feature 5: note = RNA
  misc_feature 6..9: note = DNA
  misc_feature 10..100: note = RNA

SEQ ID NO: 453 - DNA, 100 bp, synthetic construct; identical to SEQ ID NO: 72
  source 1..100: mol_type = other DNA
  modified_base 1..3: mod_base = OTHER; note = 2'-O-methyl ribonucleotide
  modified_base 21: mod_base = OTHER; note = 2'-O-methyl ribonucleotide
  modified_base 28..32: mod_base = OTHER; note = 2'-O-methyl ribonucleotide
  modified_base 34..42: mod_base = OTHER; note = 2'-O-methyl ribonucleotide
  modified_base 46: mod_base = OTHER; note = 2'-O-methyl ribonucleotide
  modified_base 48: mod_base = OTHER; note = 2'-O-methyl ribonucleotide
  modified_base 50: mod_base = OTHER; note = 2'-O-methyl ribonucleotide
  modified_base 52..57: mod_base = OTHER; note = 2'-O-methyl ribonucleotide
  modified_base 60..61: mod_base = OTHER; note = 2'-O-methyl ribonucleotide
  modified_base 66..67: mod_base = OTHER; note = 2'-O-methyl ribonucleotide
  modified_base 70..72: mod_base = OTHER; note = 2'-O-methyl ribonucleotide
  modified_base 74..81: mod_base = OTHER; note = 2'-O-methyl ribonucleotide
  modified_base 83..100: mod_base = OTHER; note = 2'-O-methyl ribonucleotide
  modified_base 1..4: mod_base = OTHER; note = phosphorothioate linkage
  modified_base 97..100: mod_base = OTHER; note = phosphorothioate linkage
  misc_feature 1..2: note = RNA
  misc_feature 3..4: note = DNA
  misc_feature 5: note = RNA
  misc_feature 6..10: note = DNA
  misc_feature 11..100: note = RNA

SEQ ID NO: 454 - DNA, 100 bp, synthetic construct; identical to SEQ ID NO: 72
  source 1..100: mol_type = other DNA
  modified_base 1..2: mod_base = OTHER; note = 2'-O-methyl ribonucleotide
  modified_base 21: mod_base = OTHER; note = 2'-O-methyl ribonucleotide
  modified_base 28..32: mod_base = OTHER; note = 2'-O-methyl ribonucleotide
  modified_base 34..42: mod_base = OTHER; note = 2'-O-methyl ribonucleotide
  modified_base 46: mod_base = OTHER; note = 2'-O-methyl ribonucleotide
  modified_base 48: mod_base = OTHER; note = 2'-O-methyl ribonucleotide
  modified_base 50: mod_base = OTHER; note = 2'-O-methyl ribonucleotide
  modified_base 52..57: mod_base = OTHER; note = 2'-O-methyl ribonucleotide
  modified_base 60..61: mod_base = OTHER; note = 2'-O-methyl ribonucleotide
  modified_base 66..67: mod_base = OTHER; note = 2'-O-methyl ribonucleotide
  modified_base 70..72: mod_base = OTHER; note = 2'-O-methyl ribonucleotide
  modified_base 74..81: mod_base = OTHER; note = 2'-O-methyl ribonucleotide
  modified_base 83..100: mod_base = OTHER; note = 2'-O-methyl ribonucleotide
  modified_base 1..4: mod_base = OTHER; note = phosphorothioate linkage
  modified_base 97..100: mod_base = OTHER; note = phosphorothioate linkage
  misc_feature 1..2: note = RNA
  misc_feature 3..4: note = DNA
  misc_feature 5..6: note = RNA
  misc_feature 7..9: note = DNA
  misc_feature 10..100: note = RNA

SEQ ID NO: 455 - DNA, 100 bp, synthetic construct; identical to SEQ ID NO: 72
  source 1..100: mol_type = other DNA
  modified_base 1..2: mod_base = OTHER; note = 2'-O-methyl ribonucleotide
  modified_base 21: mod_base = OTHER; note = 2'-O-methyl ribonucleotide
  modified_base 28..32: mod_base = OTHER; note = 2'-O-methyl ribonucleotide
  modified_base 34..42: mod_base = OTHER; note = 2'-O-methyl ribonucleotide
  modified_base 46: mod_base = OTHER; note = 2'-O-methyl ribonucleotide
  modified_base 48: mod_base = OTHER; note = 2'-O-methyl ribonucleotide
  modified_base 50: mod_base = OTHER; note = 2'-O-methyl ribonucleotide
  modified_base 52..57: mod_base = OTHER; note = 2'-O-methyl ribonucleotide
  modified_base 60..61: mod_base = OTHER; note = 2'-O-methyl ribonucleotide
  modified_base 66..67: mod_base = OTHER; note = 2'-O-methyl ribonucleotide
  modified_base 70..72: mod_base = OTHER; note = 2'-O-methyl ribonucleotide
  modified_base 74..81: mod_base = OTHER; note = 2'-O-methyl ribonucleotide
  modified_base 83..100: mod_base = OTHER; note = 2'-O-methyl ribonucleotide
  modified_base 1..4: mod_base = OTHER; note = phosphorothioate linkage
  modified_base 97..100: mod_base = OTHER; note = phosphorothioate linkage
  misc_feature 1..2: note = RNA
  misc_feature 3..4: note = DNA
  misc_feature 5..6: note = RNA
  misc_feature 7..10: note = DNA
  misc_feature 11..100: note = RNA

SEQ ID NO: 456 - DNA, 100 bp, synthetic construct; identical to SEQ ID NO: 72
  source 1..100: mol_type = other DNA
  modified_base 1..2: mod_base = OTHER; note = 2'-O-methyl ribonucleotide
  modified_base 21: mod_base = OTHER; note = 2'-O-methyl ribonucleotide
  modified_base 28..32: mod_base = OTHER; note = 2'-O-methyl ribonucleotide
  modified_base 34..42: mod_base = OTHER; note = 2'-O-methyl ribonucleotide
  modified_base 46: mod_base = OTHER; note = 2'-O-methyl ribonucleotide
  modified_base 48: mod_base = OTHER; note = 2'-O-methyl ribonucleotide
  modified_base 50: mod_base = OTHER; note = 2'-O-methyl ribonucleotide
  modified_base 52..57: mod_base = OTHER; note = 2'-O-methyl ribonucleotide
  modified_base 60..61: mod_base = OTHER; note = 2'-O-methyl ribonucleotide
  modified_base 66..67: mod_base = OTHER; note = 2'-O-methyl ribonucleotide
  modified_base 70..72: mod_base = OTHER; note = 2'-O-methyl ribonucleotide
  modified_base 74..81: mod_base = OTHER; note = 2'-O-methyl ribonucleotide
  modified_base 83..100: mod_base = OTHER; note = 2'-O-methyl ribonucleotide
  modified_base 1..4: mod_base = OTHER; note = phosphorothioate linkage
  modified_base 97..100: mod_base = OTHER; note = phosphorothioate linkage
  misc_feature 1..2: note = RNA
  misc_feature 3: note = DNA
  misc_feature 4: note = RNA
  misc_feature 5: note = DNA
  misc_feature 6: note = RNA
  misc_feature 7: note = DNA
  misc_feature 8: note = RNA
  misc_feature 9: note = DNA
  misc_feature 10..100: note = RNA

SEQ ID NO: 457 - DNA, 100 bp, synthetic construct; identical to SEQ ID NO: 72
  source 1..100: mol_type = other DNA
  modified_base 1..3: mod_base = OTHER; note = 2'-O-methyl ribonucleotide
  modified_base 21: mod_base = OTHER; note = 2'-O-methyl ribonucleotide
  modified_base 28..32: mod_base = OTHER; note = 2'-O-methyl ribonucleotide
  modified_base 34..42: mod_base = OTHER; note = 2'-O-methyl ribonucleotide
  modified_base 46: mod_base = OTHER; note = 2'-O-methyl ribonucleotide
  modified_base 48: mod_base = OTHER; note = 2'-O-methyl ribonucleotide
  modified_base 50: mod_base = OTHER; note = 2'-O-methyl ribonucleotide
  modified_base 52..57: mod_base = OTHER; note = 2'-O-methyl ribonucleotide
  modified_base 60..61: mod_base = OTHER; note = 2'-O-methyl ribonucleotide
  modified_base 66..67: mod_base = OTHER; note = 2'-O-methyl ribonucleotide
  modified_base 70..72: mod_base = OTHER; note = 2'-O-methyl ribonucleotide
  modified_base 74..81: mod_base = OTHER; note = 2'-O-methyl ribonucleotide
  modified_base 83..100: mod_base = OTHER; note = 2'-O-methyl ribonucleotide
  modified_base 1..4: mod_base = OTHER; note = phosphorothioate linkage
  modified_base 97..100: mod_base = OTHER; note = phosphorothioate linkage
  misc_feature 1..3: note = RNA
  misc_feature 4: note = DNA
  misc_feature 5: note = RNA
  misc_feature 6: note = DNA
  misc_feature 7: note = RNA
  misc_feature 8: note = DNA
  misc_feature 9: note = RNA
  misc_feature 10: note = DNA
  misc_feature 11..100: note = RNA

SEQ ID NO: 458 - DNA, 100 bp, synthetic construct; identical to SEQ ID NO: 72
  source 1..100: mol_type = other DNA
  modified_base 1..3: mod_base = OTHER; note = 2'-O-methyl ribonucleotide
  modified_base 21: mod_base = OTHER; note = 2'-O-methyl ribonucleotide
  modified_base 28..32: mod_base = OTHER; note = 2'-O-methyl ribonucleotide
  modified_base 34..42: mod_base = OTHER; note = 2'-O-methyl ribonucleotide
  modified_base 46: mod_base = OTHER; note = 2'-O-methyl ribonucleotide
  modified_base 48: mod_base = OTHER; note = 2'-O-methyl ribonucleotide
  modified_base 50: mod_base = OTHER; note = 2'-O-methyl ribonucleotide
  modified_base 52..57: mod_base = OTHER; note = 2'-O-methyl ribonucleotide
  modified_base 60..61: mod_base = OTHER; note = 2'-O-methyl ribonucleotide
  modified_base 66..67: mod_base = OTHER; note = 2'-O-methyl ribonucleotide
  modified_base 70..72: mod_base = OTHER; note = 2'-O-methyl ribonucleotide
  modified_base 74..81: mod_base = OTHER; note = 2'-O-methyl ribonucleotide
  modified_base 83..100: mod_base = OTHER; note = 2'-O-methyl ribonucleotide
  modified_base 1..4: mod_base = OTHER; note = phosphorothioate linkage
  modified_base 97..100: mod_base = OTHER; note = phosphorothioate linkage
  misc_feature 1..8: note = RNA
  misc_feature 9: note = DNA
  misc_feature 10..12: note = RNA
  misc_feature 13: note = DNA
  misc_feature 14..100: note = RNA

SEQ ID NO: 459 - DNA, 100 bp, synthetic construct; identical to SEQ ID NO: 72
  source 1..100: mol_type = other DNA
  modified_base 1..2: mod_base = OTHER; note = 2'-O-methyl ribonucleotide
  modified_base 21: mod_base = OTHER; note = 2'-O-methyl ribonucleotide
  modified_base 28..32: mod_base = OTHER; note = 2'-O-methyl ribonucleotide
  modified_base 34..42: mod_base = OTHER; note = 2'-O-methyl ribonucleotide
  modified_base 46: mod_base = OTHER; note = 2'-O-methyl ribonucleotide
  modified_base 48: mod_base = OTHER; note = 2'-O-methyl ribonucleotide
  modified_base 50: mod_base = OTHER; note = 2'-O-methyl ribonucleotide
  modified_base 52..57: mod_base = OTHER; note = 2'-O-methyl ribonucleotide
  modified_base 60..61: mod_base = OTHER; note = 2'-O-methyl ribonucleotide
  modified_base 66..67: mod_base = OTHER; note = 2'-O-methyl ribonucleotide
  modified_base 70..72: mod_base = OTHER; note = 2'-O-methyl ribonucleotide
  modified_base 74..81: mod_base = OTHER; note = 2'-O-methyl ribonucleotide
  modified_base 83..100: mod_base = OTHER; note = 2'-O-methyl ribonucleotide
  modified_base 1..4: mod_base = OTHER; note = phosphorothioate linkage
  modified_base 97..100: mod_base = OTHER; note = phosphorothioate linkage
  misc_feature 1..2: note = RNA
  misc_feature 3: note = DNA
  misc_feature 4..6: note = RNA
  misc_feature 7: note = DNA
  misc_feature 8: note = RNA
  misc_feature 9: note = DNA
  misc_feature 10..12: note = RNA
  misc_feature 13: note = DNA
  misc_feature 14..100: note = RNA

SEQ ID NO: 460 - DNA, 100 bp, synthetic construct; identical to SEQ ID NO: 72
  source 1..100: mol_type = other DNA
  modified_base 1..3: mod_base = OTHER; note = 2'-O-methyl ribonucleotide
  modified_base 21: mod_base = OTHER; note = 2'-O-methyl ribonucleotide
  modified_base 28..32: mod_base = OTHER; note = 2'-O-methyl ribonucleotide
  modified_base 34..42: mod_base = OTHER; note = 2'-O-methyl ribonucleotide
  modified_base 46: mod_base = OTHER; note = 2'-O-methyl ribonucleotide
  modified_base 48: mod_base = OTHER; note = 2'-O-methyl ribonucleotide
  modified_base 50: mod_base = OTHER; note = 2'-O-methyl ribonucleotide
  modified_base 52..57: mod_base = OTHER; note = 2'-O-methyl ribonucleotide
  modified_base 60..61: mod_base = OTHER; note = 2'-O-methyl ribonucleotide
  modified_base 66..67: mod_base = OTHER; note = 2'-O-methyl ribonucleotide
  modified_base 70..72: mod_base = OTHER; note = 2'-O-methyl ribonucleotide
  modified_base 74..81: mod_base = OTHER; note = 2'-O-methyl ribonucleotide
  modified_base 83..100: mod_base = OTHER; note = 2'-O-methyl ribonucleotide
  modified_base 1..4: mod_base = OTHER; note = phosphorothioate linkage
  modified_base 97..100: mod_base = OTHER; note = phosphorothioate linkage
  misc_feature 1..11: note = RNA
  misc_feature 12: note = DNA
  misc_feature 13: note = RNA
  misc_feature 14: note = DNA
  misc_feature 15..100: note = RNA

SEQ ID NO: 461 - DNA, 100 bp, synthetic construct; identical to SEQ ID NO: 72
  source 1..100: mol_type = other DNA
  modified_base 1..2: mod_base = OTHER; note = 2'-O-methyl ribonucleotide
  modified_base 21: mod_base = OTHER; note = 2'-O-methyl ribonucleotide
  modified_base 28..32: mod_base = OTHER; note = 2'-O-methyl ribonucleotide
  modified_base 34..42: mod_base = OTHER; note = 2'-O-methyl ribonucleotide
  modified_base 46: mod_base = OTHER; note = 2'-O-methyl ribonucleotide
  modified_base 48: mod_base = OTHER; note = 2'-O-methyl ribonucleotide
  modified_base 50: mod_base = OTHER; note = 2'-O-methyl ribonucleotide
  modified_base 52..57: mod_base = OTHER; note = 2'-O-methyl ribonucleotide
  modified_base 60..61: mod_base = OTHER; note = 2'-O-methyl ribonucleotide
  modified_base 66..67: mod_base = OTHER; note = 2'-O-methyl ribonucleotide
  modified_base 70..72: mod_base = OTHER; note = 2'-O-methyl ribonucleotide
  modified_base 74..81: mod_base = OTHER; note = 2'-O-methyl ribonucleotide
  modified_base 83..100: mod_base = OTHER; note = 2'-O-methyl ribonucleotide
  modified_base 1..4: mod_base = OTHER; note = phosphorothioate linkage
  modified_base 97..100: mod_base = OTHER; note = phosphorothioate linkage
  misc_feature 1..2: note = RNA
  misc_feature 3: note = DNA
  misc_feature 4..6: note = RNA
  misc_feature 7: note = DNA
  misc_feature 8..11: note = RNA
  misc_feature 12: note = DNA
  misc_feature 13: note = RNA
  misc_feature 14: note = DNA
  misc_feature 15..100: note = RNA

SEQ ID NO: 462 - RNA, 100 nt, synthetic construct; identical to SEQ ID NO: 69
  source 1..100: mol_type = other RNA
  modified_base 1..3: mod_base = OTHER; note = 2'-O-methyl ribonucleotide
  modified_base 21..100: mod_base = OTHER; note = 2'-O-methyl ribonucleotide
  modified_base 7: mod_base = OTHER; note = Locked nucleic acid
  modified_base 1..4: mod_base = OTHER; note = phosphorothioate linkage
  modified_base 97..100: mod_base = OTHER; note = phosphorothioate linkage

SEQ ID NO: 463 - RNA, 100 nt, synthetic construct; identical to SEQ ID NO: 69
  source 1..100: mol_type = other RNA
  modified_base 1..3: mod_base = OTHER; note = 2'-O-methyl ribonucleotide
  modified_base 21..100: mod_base = OTHER; note = 2'-O-methyl ribonucleotide
  modified_base 7..8: mod_base = OTHER; note = Locked nucleic acid
  modified_base 1..4: mod_base = OTHER; note = phosphorothioate linkage
  modified_base 97..100: mod_base = OTHER; note = phosphorothioate linkage

SEQ ID NO: 464 - RNA, 100 nt, synthetic construct
  source 1..100: mol_type = other RNA
  modified_base 1..3: mod_base = OTHER; note = 2'-O-methyl ribonucleotide
  modified_base 21: mod_base = OTHER; note = 2'-O-methyl ribonucleotide
  modified_base 28..32: mod_base = OTHER; note = 2'-O-methyl ribonucleotide
  modified_base 34..42: mod_base = OTHER; note = 2'-O-methyl ribonucleotide
  modified_base 46: mod_base = OTHER; note = 2'-O-methyl ribonucleotide
  modified_base 48: mod_base = OTHER; note = 2'-O-methyl ribonucleotide
  modified_base 50: mod_base = OTHER; note = 2'-O-methyl ribonucleotide
  modified_base 52..57: mod_base = OTHER; note = 2'-O-methyl ribonucleotide
  modified_base 60..61: mod_base = OTHER; note = 2'-O-methyl ribonucleotide
  modified_base 66..67: mod_base = OTHER; note = 2'-O-methyl ribonucleotide
  modified_base 70..72: mod_base = OTHER; note = 2'-O-methyl ribonucleotide
  modified_base 74..81: mod_base = OTHER; note = 2'-O-methyl ribonucleotide
  modified_base 83..100: mod_base = OTHER; note = 2'-O-methyl ribonucleotide
  modified_base 1..4: mod_base = OTHER; note = phosphorothioate linkage
  modified_base 97..100: mod_base = OTHER; note = phosphorothioate linkage
  misc_difference 17: note = zebularine or 4-deoxyuridine / 4-deazacytidine
aagatacctgaataacnctcgttttagagctagaaatagcaagttaaaataaggctagtccgttatcaacttgaaaaagtggcaccgagtcggtgctttt

SEQ ID NO: 465 - RNA, 100 nt, synthetic construct
  source 1..100: mol_type = other RNA
  modified_base 1..3: mod_base = OTHER; note = 2'-O-methyl ribonucleotide
  modified_base 21: mod_base = OTHER; note = 2'-O-methyl ribonucleotide
  modified_base 28..32: mod_base = OTHER; note = 2'-O-methyl ribonucleotide
  modified_base 34..42: mod_base = OTHER; note = 2'-O-methyl ribonucleotide
  modified_base 46: mod_base = OTHER; note = 2'-O-methyl ribonucleotide
  modified_base 48: mod_base = OTHER; note = 2'-O-methyl ribonucleotide
  modified_base 50: mod_base = OTHER; note = 2'-O-methyl ribonucleotide
  modified_base 52..57: mod_base = OTHER; note = 2'-O-methyl ribonucleotide
  modified_base 60..61: mod_base = OTHER; note = 2'-O-methyl ribonucleotide
  modified_base 66..67: mod_base = OTHER; note = 2'-O-methyl ribonucleotide
  modified_base 70..72: mod_base = OTHER; note = 2'-O-methyl ribonucleotide
  modified_base 74..81: mod_base = OTHER; note = 2'-O-methyl ribonucleotide
  modified_base 83..100: mod_base = OTHER; note = 2'-O-methyl ribonucleotide
  modified_base 1..4: mod_base = OTHER; note = phosphorothioate linkage
  modified_base 97..100: mod_base = OTHER; note = phosphorothioate linkage
  misc_difference 5: note = zebularine or 4-deoxyuridine / 4-deazacytidine
  misc_difference 9: note = zebularine or 4-deoxyuridine / 4-deazacytidine
aaganaccngaataaccctcgttttagagctagaaatagcaagttaaaataaggctagtccgttatcaacttgaaaaagtggcaccgagtcggtgctttt

SEQ ID NO: 466 - RNA, 100 nt, synthetic construct
  source 1..100: mol_type = other RNA
  modified_base 1..3: mod_base = OTHER; note = 2'-O-methyl ribonucleotide
  modified_base 21: mod_base = OTHER; note = 2'-O-methyl ribonucleotide
  modified_base 28..32: mod_base = OTHER; note = 2'-O-methyl ribonucleotide
  modified_base 34..42: mod_base = OTHER; note = 2'-O-methyl ribonucleotide
  modified_base 46: mod_base = OTHER; note = 2'-O-methyl ribonucleotide
  modified_base 48: mod_base = OTHER; note = 2'-O-methyl ribonucleotide
  modified_base 50: mod_base = OTHER; note = 2'-O-methyl ribonucleotide
  modified_base 52..57: mod_base = OTHER; note = 2'-O-methyl ribonucleotide
  modified_base 60..61: mod_base = OTHER; note = 2'-O-methyl ribonucleotide
  modified_base 66..67: mod_base = OTHER; note = 2'-O-methyl ribonucleotide
  modified_base 70..72: mod_base = OTHER; note = 2'-O-methyl ribonucleotide
  modified_base 74..81: mod_base = OTHER; note = 2'-O-methyl ribonucleotide
  modified_base 83..100: mod_base = OTHER; note = 2'-O-methyl ribonucleotide
  modified_base 1..4: mod_base = OTHER; note = phosphorothioate linkage
  modified_base 97..100: mod_base = OTHER; note = phosphorothioate linkage
  misc_difference 17: note = zebularine or 4-deoxyuridine / 4-deazacytidine
  misc_difference 21: note = zebularine or 4-deoxyuridine / 4-deazacytidine
tcggaagatacctgaanaacnctcgttttagagctagaaatagcaagttaaaataaggctagtccgttatcaacttgaaaaagtggcaccgagtgctttt

SEQ ID NO: 467 - RNA, 100 nt, synthetic construct
  source 1..100: mol_type = other RNA
  modified_base 1..3: mod_base = OTHER; note = 2'-O-methyl ribonucleotide
  modified_base 21: mod_base = OTHER; note = 2'-O-methyl ribonucleotide
  modified_base 28..32: mod_base = OTHER; note = 2'-O-methyl ribonucleotide
  modified_base 34..42: mod_base = OTHER; note = 2'-O-methyl ribonucleotide
  modified_base 46: mod_base = OTHER; note = 2'-O-methyl ribonucleotide
  modified_base 48: mod_base = OTHER; note = 2'-O-methyl ribonucleotide
  modified_base 50: mod_base = OTHER; note = 2'-O-methyl ribonucleotide
  modified_base 52..57: mod_base = OTHER; note = 2'-O-methyl ribonucleotide
  modified_base 60..61: mod_base = OTHER; note = 2'-O-methyl ribonucleotide
  modified_base 66..67: mod_base = OTHER; note = 2'-O-methyl ribonucleotide
  modified_base 70..72: mod_base = OTHER; note = 2'-O-methyl ribonucleotide
  modified_base 74..81: mod_base = OTHER; note = 2'-O-methyl ribonucleotide
  modified_base 83..100: mod_base = OTHER; note = 2'-O-methyl ribonucleotide
  modified_base 1..4: mod_base = OTHER; note = phosphorothioate linkage
  modified_base 97..100: mod_base = OTHER; note = phosphorothioate linkage
  misc_difference 5: note = zebularine or 4-deoxyuridine / 4-deazacytidine
  misc_difference 13: note = zebularine or 4-deoxyuridine / 4-deazacytidine
  misc_difference 17: note = zebularine or 4-deoxyuridine / 4-deazacytidine
aaganacctgaanaacnctcgttttagagctagaaatagcaagttaaaataaggctagtccgttatcaacttgaaaaagtggcaccgagtcggtgctttt

SEQ ID NO: 468 - RNA, 100 nt, synthetic construct
  source 1..100: mol_type = other RNA
  modified_base 1..3: mod_base = OTHER; note = 2'-O-methyl ribonucleotide
  modified_base 21: mod_base = OTHER; note = 2'-O-methyl ribonucleotide
  modified_base 28..32: mod_base = OTHER; note = 2'-O-methyl ribonucleotide
  modified_base 34..42: mod_base = OTHER; note = 2'-O-methyl ribonucleotide
  modified_base 46: mod_base = OTHER; note = 2'-O-methyl ribonucleotide
  modified_base 48: mod_base = OTHER; note = 2'-O-methyl ribonucleotide
  modified_base 50: mod_base = OTHER; note = 2'-O-methyl ribonucleotide
  modified_base 52..57: mod_base = OTHER; note = 2'-O-methyl ribonucleotide
  modified_base 60..61: mod_base = OTHER; note = 2'-O-methyl ribonucleotide
  modified_base 66..67: mod_base = OTHER; note = 2'-O-methyl ribonucleotide
  modified_base 70..72: mod_base = OTHER; note = 2'-O-methyl ribonucleotide
  modified_base 74..81: mod_base = OTHER; note = 2'-O-methyl ribonucleotide
  modified_base 83..100: mod_base = OTHER; note = 2'-O-methyl ribonucleotide
  modified_base 1..4: mod_base = OTHER; note = phosphorothioate linkage
  modified_base 97..100: mod_base = OTHER; note = phosphorothioate linkage
  misc_difference 5: note = zebularine or 4-deoxyuridine / 4-deazacytidine
  misc_difference 9: note = zebularine or 4-deoxyuridine / 4-deazacytidine
  misc_difference 17: note = zebularine or 4-deoxyuridine / 4-deazacytidine
aaganaccngaataacnctcgttttagagctagaaatagcaagttaaaataaggctagtccgttatcaacttgaaaaagtggcaccgagtcggtgctttt

SEQ ID NO: 469 - DNA, 100 bp, synthetic construct; identical to SEQ ID NO: 73
  source 1..100: mol_type = other DNA
  modified_base 1..2: mod_base = OTHER; note = 2'-O-methyl ribonucleotide
  modified_base 21: mod_base = OTHER; note = 2'-O-methyl ribonucleotide
  modified_base 28..32: mod_base = OTHER; note = 2'-O-methyl ribonucleotide
  modified_base 34..42: mod_base = OTHER; note = 2'-O-methyl ribonucleotide
  modified_base 46: mod_base = OTHER; note = 2'-O-methyl ribonucleotide
  modified_base 48: mod_base = OTHER; note = 2'-O-methyl ribonucleotide
  modified_base 50: mod_base = OTHER; note = 2'-O-methyl ribonucleotide
  modified_base 52..57: mod_base = OTHER; note = 2'-O-methyl ribonucleotide
  modified_base 60..61: mod_base = OTHER; note = 2'-O-methyl ribonucleotide
  modified_base 66..67: mod_base = OTHER; note = 2'-O-methyl ribonucleotide
  modified_base 70..72: mod_base = OTHER; note = 2'-O-methyl ribonucleotide
  modified_base 74..81: mod_base = OTHER; note = 2'-O-methyl ribonucleotide
  modified_base 83..100: mod_base = OTHER; note = 2'-O-methyl ribonucleotide
  modified_base 1..4: mod_base = OTHER; note = phosphorothioate linkage
  modified_base 97..100: mod_base = OTHER; note = phosphorothioate linkage
  misc_feature 1..2: note = RNA
  misc_feature 3..10: note = DNA
  misc_feature 11: note = RNA
  misc_feature 12: note = DNA
  misc_feature 13: note = RNA
  misc_feature 14: note = DNA
  misc_feature 15: note = RNA
  misc_feature 16: note = DNA
  misc_feature 17: note = RNA
  misc_feature 18: note = DNA
  misc_feature 19: note = RNA
  misc_feature 20: note = DNA
  misc_feature 21..100: note = RNA

SEQ ID NO: 470 - DNA, 100 bp, synthetic construct; identical to SEQ ID NO: 73
  source 1..100: mol_type = other DNA
  modified_base 1..3: mod_base = OTHER; note = 2'-O-methyl ribonucleotide
  modified_base 21: mod_base = OTHER; note = 2'-O-methyl ribonucleotide
  modified_base 28..32: mod_base = OTHER; note = 2'-O-methyl ribonucleotide
  modified_base 34..42: mod_base = OTHER; note = 2'-O-methyl ribonucleotide
  modified_base 46: mod_base = OTHER; note = 2'-O-methyl ribonucleotide
  modified_base 48: mod_base = OTHER; note = 2'-O-methyl ribonucleotide
  modified_base 50: mod_base = OTHER; note = 2'-O-methyl ribonucleotide
  modified_base 52..57: mod_base = OTHER; note = 2'-O-methyl ribonucleotide
  modified_base 60..61: mod_base = OTHER; note = 2'-O-methyl ribonucleotide
  modified_base 66..67: mod_base = OTHER; note = 2'-O-methyl ribonucleotide
  modified_base 70..72: mod_base = OTHER; note = 2'-O-methyl ribonucleotide
  modified_base 74..81: mod_base = OTHER; note = 2'-O-methyl ribonucleotide
  modified_base 83..100: mod_base = OTHER; note = 2'-O-methyl ribonucleotide
  modified_base 1..4: mod_base = OTHER; note = phosphorothioate linkage
  modified_base 97..100: mod_base = OTHER; note = phosphorothioate linkage
  misc_feature 1..3: note = RNA
  misc_feature 4..10: note = DNA
  misc_feature 11..100: note = RNA

SEQ ID NO: 471 - DNA, 100 bp, synthetic construct; identical to SEQ ID NO: 73
  source 1..100: mol_type = other DNA
  modified_base 1..2: mod_base = OTHER; note = 2'-O-methyl ribonucleotide
  modified_base 21: mod_base = OTHER; note = 2'-O-methyl ribonucleotide
  modified_base 28..32: mod_base = OTHER; note = 2'-O-methyl ribonucleotide
  modified_base 34..42: mod_base = OTHER; note = 2'-O-methyl ribonucleotide
  modified_base 46: mod_base = OTHER; note = 2'-O-methyl ribonucleotide
  modified_base 48: mod_base = OTHER; note = 2'-O-methyl ribonucleotide
  modified_base 50: mod_base = OTHER; note = 2'-O-methyl ribonucleotide
  modified_base 52..57: mod_base = OTHER; note = 2'-O-methyl ribonucleotide
  modified_base 60..61: mod_base = OTHER; note = 2'-O-methyl ribonucleotide
  modified_base 66..67: mod_base = OTHER; note = 2'-O-methyl ribonucleotide
  modified_base 70..72: mod_base = OTHER; note = 2'-O-methyl ribonucleotide
  modified_base 74..81: mod_base = OTHER; note = 2'-O-methyl ribonucleotide
  modified_base 83..100: mod_base = OTHER; note = 2'-O-methyl ribonucleotide
  modified_base 1..4: mod_base = OTHER; note = phosphorothioate linkage
  modified_base 97..100: mod_base = OTHER; note = phosphorothioate linkage
  misc_feature 1..2: note = RNA
  misc_feature 3..10: note = DNA
  misc_feature 11..100: note = RNA

SEQ ID NO: 472 - DNA, 100 bp, synthetic construct; identical to SEQ ID NO: 72
  source 1..100: mol_type = other DNA
  modified_base 1: mod_base = OTHER; note = 2'-O-methyl ribonucleotide
  modified_base 21: mod_base = OTHER; note = 2'-O-methyl ribonucleotide
  modified_base 28..32: mod_base = OTHER; note = 2'-O-methyl ribonucleotide
  modified_base 34..42: mod_base = OTHER; note = 2'-O-methyl ribonucleotide
  modified_base 46: mod_base = OTHER; note = 2'-O-methyl ribonucleotide
  modified_base 48: mod_base = OTHER; note = 2'-O-methyl ribonucleotide
  modified_base 50: mod_base = OTHER; note = 2'-O-methyl ribonucleotide
  modified_base 52..57: mod_base = OTHER; note = 2'-O-methyl ribonucleotide
  modified_base 60..61: mod_base = OTHER; note = 2'-O-methyl ribonucleotide
  modified_base 66..67: mod_base = OTHER; note = 2'-O-methyl ribonucleotide
  modified_base 70..72: mod_base = OTHER; note = 2'-O-methyl ribonucleotide
  modified_base 74..81: mod_base = OTHER; note = 2'-O-methyl ribonucleotide
  modified_base 83..100: mod_base = OTHER; note = 2'-O-methyl ribonucleotide
  modified_base 1..4: mod_base = OTHER; note = phosphorothioate linkage
  modified_base 97..100: mod_base = OTHER; note = phosphorothioate linkage
  misc_feature 1: note = RNA
  misc_feature 2..6: note = DNA
  misc_feature 7: note = RNA
  misc_feature 8: note = DNA
  misc_feature 9: note = RNA
  misc_feature 10: note = DNA
  misc_feature 11: note = RNA
  misc_feature 12: note = DNA
  misc_feature 13: note = RNA
  misc_feature 14: note = DNA
  misc_feature 15: note = RNA
  misc_feature 16: note = DNA
  misc_feature 17: note = RNA
  misc_feature 18: note = DNA
  misc_feature 19: note = RNA
  misc_feature 20: note = DNA
  misc_feature 21..100: note = RNA

SEQ ID NO: 473 - DNA, 100 bp, synthetic construct; identical to SEQ ID NO: 72
  source 1..100: mol_type = other DNA
  modified_base 1..2: mod_base = OTHER; note = 2'-O-methyl ribonucleotide
  modified_base 21: mod_base = OTHER; note = 2'-O-methyl ribonucleotide
  modified_base 28..32: mod_base = OTHER; note = 2'-O-methyl ribonucleotide
  modified_base 34..42: mod_base = OTHER; note = 2'-O-methyl ribonucleotide
  modified_base 46: mod_base = OTHER; note = 2'-O-methyl ribonucleotide
  modified_base 48: mod_base = OTHER; note = 2'-O-methyl ribonucleotide
  modified_base 50: mod_base = OTHER; note = 2'-O-methyl ribonucleotide
  modified_base 52..57: mod_base = OTHER; note = 2'-O-methyl ribonucleotide
  modified_base 60..61: mod_base = OTHER; note = 2'-O-methyl ribonucleotide
  modified_base 66..67: mod_base = OTHER; note = 2'-O-methyl ribonucleotide
  modified_base 70..72: mod_base = OTHER; note = 2'-O-methyl ribonucleotide
  modified_base 74..81: mod_base = OTHER; note = 2'-O-methyl ribonucleotide
  modified_base 83..100: mod_base = OTHER; note = 2'-O-methyl ribonucleotide
  modified_base 1..4: mod_base = OTHER; note = phosphorothioate linkage
  modified_base 97..100: mod_base = OTHER; note = phosphorothioate linkage
  misc_feature 1..2: note = RNA
  misc_feature 3..8: note = DNA
  misc_feature 9: note = RNA
  misc_feature 10: note = DNA
  misc_feature 11: note = RNA
  misc_feature 12: note = DNA
  misc_feature 13: note = RNA
  misc_feature 14: note = DNA
  misc_feature 15: note = RNA
  misc_feature 16: note = DNA
  misc_feature 17: note = RNA
  misc_feature 18: note = DNA
  misc_feature 19: note = RNA
  misc_feature 20: note = DNA
  misc_feature 21..100: note = RNA

SEQ ID NO: 474 - DNA, 100 bp, synthetic construct; identical to SEQ ID NO: 72
  source 1..100: mol_type = other DNA
  modified_base 1..3: mod_base = OTHER; note = 2'-O-methyl ribonucleotide
  modified_base 21: mod_base = OTHER; note = 2'-O-methyl ribonucleotide
  modified_base 28..32: mod_base = OTHER; note = 2'-O-methyl ribonucleotide
  modified_base 34..42: mod_base = OTHER; note = 2'-O-methyl ribonucleotide
  modified_base 46: mod_base = OTHER; note = 2'-O-methyl ribonucleotide
  modified_base 48: mod_base = OTHER; note = 2'-O-methyl ribonucleotide
  modified_base 50: mod_base = OTHER; note = 2'-O-methyl ribonucleotide
  modified_base 52..57: mod_base = OTHER; note = 2'-O-methyl ribonucleotide
  modified_base 60..61: mod_base = OTHER; note = 2'-O-methyl ribonucleotide
  modified_base 66..67: mod_base = OTHER; note = 2'-O-methyl ribonucleotide
  modified_base 70..72: mod_base = OTHER; note = 2'-O-methyl ribonucleotide
  modified_base 74..81: mod_base = OTHER; note = 2'-O-methyl ribonucleotide
  modified_base 83..100: mod_base = OTHER; note = 2'-O-methyl ribonucleotide
  modified_base 1..4: mod_base = OTHER; note = phosphorothioate linkage
  modified_base 97..100: mod_base = OTHER; note = phosphorothioate linkage
  misc_feature 1..3: note = RNA
  misc_feature 4..6: note = DNA
  misc_feature 7: note = RNA
  misc_feature 8: note = DNA
  misc_feature 9: note = RNA
  misc_feature 10: note = DNA
  misc_feature 11: note = RNA
  misc_feature 12: note = DNA
  misc_feature 13: note = RNA
  misc_feature 14: note = DNA
  misc_feature 15: note = RNA
  misc_feature 16: note = DNA
  misc_feature 17: note = RNA
  misc_feature 18: note = DNA
  misc_feature 19: note = RNA
  misc_feature 20: note = DNA
  misc_feature 21..100: note = RNA

SEQ ID NO: 475 - DNA, 100 bp, synthetic construct; identical to SEQ ID NO: 72
  source 1..100: mol_type = other DNA
  modified_base 1..2: mod_base = OTHER; note = 2'-O-methyl ribonucleotide
  modified_base 21: mod_base = OTHER; note = 2'-O-methyl ribonucleotide
  modified_base 28..32: mod_base = OTHER; note = 2'-O-methyl ribonucleotide
  modified_base 34..42: mod_base = OTHER; note = 2'-O-methyl ribonucleotide
  modified_base 46: mod_base = OTHER; note = 2'-O-methyl ribonucleotide
  modified_base 48: mod_base = OTHER; note = 2'-O-methyl ribonucleotide
  modified_base 50: mod_base = OTHER; note = 2'-O-methyl ribonucleotide
  modified_base 52..57: mod_base = OTHER; note = 2'-O-methyl ribonucleotide
  modified_base 60..61: mod_base = OTHER; note = 2'-O-methyl ribonucleotide
  modified_base 66..67: mod_base = OTHER; note = 2'-O-methyl ribonucleotide
  modified_base 70..72: mod_base = OTHER; note = 2'-O-methyl ribonucleotide
  modified_base 74..81: mod_base = OTHER; note = 2'-O-methyl ribonucleotide
  modified_base 83..100: mod_base = OTHER; note = 2'-O-methyl ribonucleotide
  modified_base 1..4: mod_base = OTHER; note = phosphorothioate linkage
  modified_base 97..100: mod_base = OTHER; note = phosphorothioate linkage
  misc_feature 1..2: note = RNA
  misc_feature 3..12: note = DNA
  misc_feature 13: note = RNA
  misc_feature 14: note = DNA
  misc_feature 15: note = RNA
  misc_feature 16: note = DNA
  misc_feature 17: note = RNA
  misc_feature 18: note = DNA
  misc_feature 19: note = RNA
  misc_feature 20: note = DNA
  misc_feature 21..100: note = RNA

SEQ ID NO: 476 - DNA, 100 bp, synthetic construct; identical to SEQ ID NO: 72
  source 1..100: mol_type = other DNA
  modified_base 1..2: mod_base = OTHER; note = 2'-O-methyl ribonucleotide
  modified_base 21: mod_base = OTHER; note = 2'-O-methyl ribonucleotide
  modified_base 28..32: mod_base = OTHER; note = 2'-O-methyl ribonucleotide
  modified_base 34..42: mod_base = OTHER; note = 2'-O-methyl ribonucleotide
  modified_base 46: mod_base = OTHER; note = 2'-O-methyl ribonucleotide
  modified_base 48: mod_base = OTHER; note = 2'-O-methyl ribonucleotide
  modified_base 50: mod_base = OTHER; note = 2'-O-methyl ribonucleotide
  modified_base 52..57: mod_base = OTHER; note = 2'-O-methyl ribonucleotide
  modified_base 60..61: mod_base = OTHER; note = 2'-O-methyl ribonucleotide
  modified_base 66..67: mod_base = OTHER; note = 2'-O-methyl ribonucleotide
  modified_base 70..72: mod_base = OTHER; note = 2'-O-methyl ribonucleotide
  modified_base 74..81: mod_base = OTHER; note = 2'-O-methyl ribonucleotide
  modified_base 83..100: mod_base = OTHER; note = 2'-O-methyl ribonucleotide
  modified_base 1..4: mod_base = OTHER; note = phosphorothioate linkage
  modified_base 97..100: mod_base = OTHER; note = phosphorothioate linkage
  misc_feature 1..2: note = RNA
  misc_feature 3..14: note = DNA
  misc_feature 15: note = RNA
  misc_feature 16: note = DNA
  misc_feature 17: note = RNA
  misc_feature 18: note = DNA
  misc_feature 19: note = RNA
  misc_feature 20: note = DNA
  misc_feature 21..100: note = RNA

SEQ ID NO: 477 - DNA, 100 bp, synthetic construct; identical to SEQ ID NO: 72
  source 1..100: mol_type = other DNA
  modified_base 1..2: mod_base = OTHER; note = 2'-O-methyl ribonucleotide
  modified_base 21: mod_base = OTHER; note = 2'-O-methyl ribonucleotide
  modified_base 28..32: mod_base = OTHER; note = 2'-O-methyl ribonucleotide
  modified_base 34..42: mod_base = OTHER; note = 2'-O-methyl ribonucleotide
  modified_base 46: mod_base = OTHER; note = 2'-O-methyl ribonucleotide
  modified_base 48: mod_base = OTHER; note = 2'-O-methyl ribonucleotide
  modified_base 50: mod_base = OTHER; note = 2'-O-methyl ribonucleotide
  modified_base 52..57: mod_base = OTHER; note = 2'-O-methyl ribonucleotide
  modified_base 60..61: mod_base = OTHER; note = 2'-O-methyl ribonucleotide
  modified_base 66..67: mod_base = OTHER; note = 2'-O-methyl ribonucleotide
  modified_base 70..72: mod_base = OTHER; note = 2'-O-methyl ribonucleotide
  modified_base 74..81: mod_base = OTHER; note = 2'-O-methyl ribonucleotide
  modified_base 83..100: mod_base = OTHER; note = 2'-O-methyl ribonucleotide
  modified_base 1..4: mod_base = OTHER; note = phosphorothioate linkage
  modified_base 97..100: mod_base = OTHER; note = phosphorothioate linkage
  misc_feature 1..2: note = RNA
  misc_feature 3..16: note = DNA
  misc_feature 17: note = RNA
  misc_feature 18: note = DNA
  misc_feature 19: note = RNA
  misc_feature 20: note = DNA
  misc_feature 21..100: note = RNA

SEQ ID NO: 478 - DNA, 100 bp, synthetic construct; identical to SEQ ID NO: 72
  source 1..100: mol_type = other DNA
  modified_base 1..2: mod_base = OTHER; note = 2'-O-methyl ribonucleotide
  modified_base 21: mod_base = OTHER; note = 2'-O-methyl ribonucleotide
  modified_base 28..32: mod_base = OTHER; note = 2'-O-methyl ribonucleotide
  modified_base 34..42: mod_base = OTHER; note = 2'-O-methyl ribonucleotide
  modified_base 46: mod_base = OTHER; note = 2'-O-methyl ribonucleotide
  modified_base 48: mod_base = OTHER; note = 2'-O-methyl ribonucleotide
  modified_base 50: mod_base = OTHER; note = 2'-O-methyl ribonucleotide
  modified_base 52..57: mod_base = OTHER; note = 2'-O-methyl ribonucleotide
  modified_base 60..61: mod_base = OTHER; note = 2'-O-methyl ribonucleotide
  modified_base 66..67: mod_base = OTHER; note = 2'-O-methyl ribonucleotide
  modified_base 70..72: mod_base = OTHER; note = 2'-O-methyl ribonucleotide
  modified_base 74..81: mod_base = OTHER; note = 2'-O-methyl ribonucleotide
  modified_base 83..100: mod_base = OTHER; note = 2'-O-methyl ribonucleotide
  modified_base 1..4: mod_base = OTHER; note = phosphorothioate linkage
  modified_base 97..100: mod_base = OTHER; note = phosphorothioate linkage
  misc_feature 1..2: note = RNA
  misc_feature 3..18: note = DNA
  misc_feature 19: note = RNA
  misc_feature 20: note = DNA
  misc_feature 21..100: note = RNA

SEQ ID NO: 479 - DNA, 100 bp, synthetic construct; identical to SEQ ID NO: 72
  source 1..100: mol_type = other DNA
  modified_base 1..2: mod_base = OTHER; note = 2'-O-methyl ribonucleotide
  modified_base 21: mod_base = OTHER; note = 2'-O-methyl ribonucleotide
  modified_base 28..32: mod_base = OTHER; note = 2'-O-methyl ribonucleotide
  modified_base 34..42: mod_base = OTHER; note = 2'-O-methyl ribonucleotide
  modified_base 46: mod_base = OTHER; note = 2'-O-methyl ribonucleotide
  modified_base 48: mod_base = OTHER; note = 2'-O-methyl ribonucleotide
  modified_base 50: mod_base = OTHER; note = 2'-O-methyl ribonucleotide
  modified_base 52..57: mod_base = OTHER; note = 2'-O-methyl ribonucleotide
  modified_base 60..61: mod_base = OTHER; note = 2'-O-methyl ribonucleotide
  modified_base 66..67: mod_base = OTHER; note = 2'-O-methyl ribonucleotide
  modified_base 70..72: mod_base = OTHER; note = 2'-O-methyl ribonucleotide
  modified_base 74..81: mod_base = OTHER; note = 2'-O-methyl ribonucleotide
  modified_base 83..100: mod_base = OTHER; note = 2'-O-methyl ribonucleotide
  modified_base 1..4: mod_base = OTHER; note = phosphorothioate linkage
  modified_base 97..100: mod_base = OTHER; note = phosphorothioate linkage
  misc_feature 1..2: note = RNA
  misc_feature 3..20: note = DNA
  misc_feature 21..100: note = RNA

SEQ ID NO: 480 - DNA, 100 bp, synthetic construct; identical to SEQ ID NO: 72
  source 1..100: mol_type = other DNA
  modified_base 1: mod_base = OTHER; note = 2'-O-methyl ribonucleotide
  modified_base 21: mod_base = OTHER; note = 2'-O-methyl ribonucleotide
  modified_base 28..32: mod_base = OTHER; note = 2'-O-methyl ribonucleotide
  modified_base 34..42: mod_base = OTHER; note = 2'-O-methyl ribonucleotide
  modified_base 46: mod_base = OTHER; note = 2'-O-methyl ribonucleotide
  modified_base 48: mod_base = OTHER; note = 2'-O-methyl ribonucleotide
  modified_base 50: mod_base = OTHER; note = 2'-O-methyl ribonucleotide
  modified_base 52..57: mod_base = OTHER; note = 2'-O-methyl ribonucleotide
  modified_base 60..61: mod_base = OTHER; note = 2'-O-methyl ribonucleotide
  modified_base 66..67: mod_base = OTHER; note = 2'-O-methyl ribonucleotide
  modified_base 70..72: mod_base = OTHER; note = 2'-O-methyl ribonucleotide
  modified_base 74..81: mod_base = OTHER; note = 2'-O-methyl ribonucleotide
  modified_base 83..100: mod_base = OTHER; note = 2'-O-methyl ribonucleotide
  modified_base 1..4: mod_base = OTHER; note = phosphorothioate linkage
  modified_base 97..100: mod_base = OTHER; note = phosphorothioate linkage
  misc_feature 1: note = RNA
  misc_feature 2..20: note = DNA
  misc_feature 21..100: note = RNA

SEQ ID NO: 481 - DNA, 100 bp, synthetic construct; identical to SEQ ID NO: 72
  source 1..100: mol_type = other DNA
  modified_base 1..3: mod_base = OTHER; note = 2'-O-methyl ribonucleotide
  modified_base 21: mod_base = OTHER; note = 2'-O-methyl ribonucleotide
  modified_base 28..32: mod_base = OTHER; note = 2'-O-methyl ribonucleotide
  modified_base 34..42: mod_base = OTHER; note = 2'-O-methyl ribonucleotide
  modified_base 46: mod_base = OTHER; note = 2'-O-methyl ribonucleotide
  modified_base 48: mod_base = OTHER; note = 2'-O-methyl ribonucleotide
  modified_base 50: mod_base = OTHER; note = 2'-O-methyl ribonucleotide
  modified_base 52..57: mod_base = OTHER; note = 2'-O-methyl ribonucleotide
  modified_base 60..61: mod_base = OTHER; note = 2'-O-methyl ribonucleotide
  modified_base 66..67: mod_base = OTHER; note = 2'-O-methyl ribonucleotide
  modified_base 70..72: mod_base = OTHER; note = 2'-O-methyl ribonucleotide
  modified_base 74..81: mod_base = OTHER; note = 2'-O-methyl ribonucleotide
  modified_base 83..100: mod_base = OTHER; note = 2'-O-methyl ribonucleotide
  modified_base 1..4: mod_base = OTHER; note = phosphorothioate linkage
  modified_base 97..100: mod_base = OTHER; note = phosphorothioate linkage
  misc_feature 1..3: note = RNA
  misc_feature 4..5: note = DNA
  misc_feature 6: note = RNA
  misc_feature 7: note = DNA
  misc_feature 8: note = RNA
  misc_feature 9: note = DNA
  misc_feature 10: note = RNA
  misc_feature 11: note = DNA
  misc_feature 12: note = RNA
  misc_feature 13: note = DNA
  misc_feature 14: note = RNA
  misc_feature 15: note = DNA
  misc_feature 16: note = RNA
  misc_feature 17: note = DNA
  misc_feature 18: note = RNA
  misc_feature 19: note = DNA
  misc_feature 20..100: note = RNA

SEQ ID NO: 482 - DNA, 100 bp, synthetic construct; identical to SEQ ID NO: 72
  source 1..100: mol_type = other DNA
  modified_base 1..2: mod_base = OTHER; note = 2'-O-methyl ribonucleotide
  modified_base 21: mod_base = OTHER; note = 2'-O-methyl ribonucleotide
  modified_base 28..32: mod_base = OTHER; note = 2'-O-methyl ribonucleotide
  modified_base 34..42: mod_base = OTHER; note = 2'-O-methyl ribonucleotide
  modified_base 46: mod_base = OTHER; note = 2'-O-methyl ribonucleotide
  modified_base 48: mod_base = OTHER; note = 2'-O-methyl ribonucleotide
  modified_base 50: mod_base = OTHER; note = 2'-O-methyl ribonucleotide
  modified_base 52..57: mod_base = OTHER; note = 2'-O-methyl ribonucleotide
  modified_base 60..61: mod_base = OTHER; note = 2'-O-methyl ribonucleotide
  modified_base 66..67: mod_base = OTHER; note = 2'-O-methyl ribonucleotide
  modified_base 70..72: mod_base = OTHER; note = 2'-O-methyl ribonucleotide
  modified_base 74..81: mod_base = OTHER; note = 2'-O-methyl ribonucleotide
  modified_base 83..100: mod_base = OTHER; note = 2'-O-methyl ribonucleotide
  modified_base 1..4: mod_base = OTHER; note = phosphorothioate linkage
  modified_base 97..100: mod_base = OTHER; note = phosphorothioate linkage
  misc_feature 1..2: note = RNA
  misc_feature 3: note = DNA
  misc_feature 4: note = RNA
  misc_feature 5: note = DNA
  misc_feature 6: note = RNA
  misc_feature 7: note = DNA
  misc_feature 8: note = RNA
  misc_feature 9: note = DNA
  misc_feature 10: note = RNA
  misc_feature 11: note = DNA
  misc_feature 12: note = RNA
  misc_feature 13: note = DNA
  misc_feature 14: note = RNA
  misc_feature 15: note = DNA
  misc_feature 16: note = RNA
  misc_feature 17: note = DNA
  misc_feature 18: note = RNA
  misc_feature 19: note = DNA
  misc_feature 20..100: note = RNA

SEQ ID NO: 483 - DNA, 100 bp, synthetic construct; identical to SEQ ID NO: 72
  source 1..100: mol_type = other DNA
  modified_base 1..2: mod_base = OTHER; note = 2'-O-methyl ribonucleotide
  modified_base 21: mod_base = OTHER; note = 2'-O-methyl ribonucleotide
  modified_base 28..32: mod_base = OTHER; note = 2'-O-methyl ribonucleotide
  modified_base 34..42: mod_base = OTHER; note = 2'-O-methyl ribonucleotide
  modified_base 46: mod_base = OTHER; note = 2'-O-methyl ribonucleotide
  modified_base 48: mod_base = OTHER; note = 2'-O-methyl ribonucleotide
  modified_base 50: mod_base = OTHER; note = 2'-O-methyl ribonucleotide
  modified_base 52..57: mod_base = OTHER; note = 2'-O-methyl ribonucleotide
  modified_base 60..61: mod_base = OTHER; note = 2'-O-methyl ribonucleotide
  modified_base 66..67: mod_base = OTHER; note = 2'-O-methyl ribonucleotide
  modified_base 70..72: mod_base = OTHER; note = 2'-O-methyl ribonucleotide
  modified_base 74..81: mod_base = OTHER; note = 2'-O-methyl ribonucleotide
  modified_base 83..100: mod_base = OTHER; note = 2'-O-methyl ribonucleotide
  modified_base 1..4: mod_base = OTHER; note = phosphorothioate linkage
  modified_base 97..100: mod_base = OTHER; note = phosphorothioate linkage
  misc_feature 1..2: note = RNA
  misc_feature 3..5: note = DNA
  misc_feature 6: note = RNA
  misc_feature 7: note = DNA
  misc_feature 8: note = RNA
  misc_feature 9: note = DNA
  misc_feature 10: note = RNA
  misc_feature 11: note = DNA
  misc_feature 12: note = RNA
  misc_feature 13: note = DNA
  misc_feature 14: note = RNA
  misc_feature 15: note = DNA
  misc_feature 16: note = RNA
  misc_feature 17: note = DNA
  misc_feature 18: note = RNA
  misc_feature 19: note = DNA
  misc_feature 20..100: note = RNA

SEQ ID NO: 484 - DNA, 100 bp, synthetic construct; identical to SEQ ID NO: 72
  source 1..100: mol_type = other DNA
  modified_base 1..2: mod_base = OTHER; note = 2'-O-methyl ribonucleotide
  modified_base 21: mod_base = OTHER; note = 2'-O-methyl ribonucleotide
  modified_base 28..32: mod_base = OTHER; note = 2'-O-methyl ribonucleotide
  modified_base 34..42: mod_base = OTHER; note = 2'-O-methyl ribonucleotide
  modified_base 46: mod_base = OTHER; note = 2'-O-methyl ribonucleotide
  modified_base 48: mod_base = OTHER; note = 2'-O-methyl ribonucleotide
  modified_base 50: mod_base = OTHER; note = 2'-O-methyl ribonucleotide
  modified_base 52..57: mod_base = OTHER; note = 2'-O-methyl ribonucleotide
  modified_base 60..61: mod_base = OTHER; note = 2'-O-methyl ribonucleotide
  modified_base 66..67: mod_base = OTHER; note = 2'-O-methyl ribonucleotide
  modified_base 70..72: mod_base = OTHER; note = 2'-O-methyl ribonucleotide
  modified_base 74..81: mod_base = OTHER; note = 2'-O-methyl ribonucleotide
  modified_base 83..100: mod_base = OTHER; note = 2'-O-methyl ribonucleotide
  modified_base 1..4: mod_base = OTHER; note = phosphorothioate linkage
  modified_base 97..100: mod_base = OTHER; note = phosphorothioate linkage
  misc_feature 1..2: note = RNA
  misc_feature 3..7: note = DNA
  misc_feature 8: note = RNA
  misc_feature 9: note = DNA
  misc_feature 10: note = RNA
  misc_feature 11: note = DNA
  misc_feature 12: note = RNA
  misc_feature 13: note = DNA
  misc_feature 14: note = RNA
  misc_feature 15: note = DNA
  misc_feature 16: note = RNA
  misc_feature 17: note = DNA
  misc_feature 18: note = RNA
  misc_feature 19: note = DNA
  misc_feature 20..100: note = RNA

SEQ ID NO: 485 - DNA, 100 bp, synthetic construct; identical to SEQ ID NO: 72
  source 1..100: mol_type = other DNA
  modified_base 1..3: mod_base = OTHER; note = 2'-O-methyl ribonucleotide
  modified_base 21: mod_base = OTHER; note = 2'-O-methyl ribonucleotide
  modified_base 28..32: mod_base = OTHER; note = 2'-O-methyl ribonucleotide
  modified_base 34..42: mod_base = OTHER; note = 2'-O-methyl ribonucleotide
  modified_base 46: mod_base = OTHER; note = 2'-O-methyl ribonucleotide
  modified_base 48: mod_base = OTHER; note = 2'-O-methyl ribonucleotide
  modified_base 50: mod_base = OTHER; note = 2'-O-methyl ribonucleotide
  modified_base 52..57: mod_base = OTHER; note = 2'-O-methyl ribonucleotide
  modified_base 60..61: mod_base = OTHER; note = 2'-O-methyl ribonucleotide
  modified_base 66..67: mod_base = OTHER; note = 2'-O-methyl ribonucleotide
  modified_base 70..72: mod_base = OTHER; note = 2'-O-methyl ribonucleotide
  modified_base 74..81: mod_base = OTHER; note = 2'-O-methyl ribonucleotide
  modified_base 83..100: mod_base = OTHER; note = 2'-O-methyl ribonucleotide
  modified_base 1..4: mod_base = OTHER; note = phosphorothioate linkage
  modified_base 97..100: mod_base = OTHER; note = phosphorothioate linkage
  misc_feature 1..2: note = RNA
  misc_feature 3..9: note = DNA
  misc_feature 10: note = RNA
  misc_feature 11: note = DNA
  misc_feature 12: note = RNA
  misc_feature 13: note = DNA
  misc_feature 14: note = RNA
  misc_feature 15: note = DNA
  misc_feature 16: note = RNA
  misc_feature 17: note = DNA
  misc_feature 18: note = RNA
  misc_feature 19: note = DNA
  misc_feature 20..100: note = RNA

SEQ ID NO: 486 - DNA, 100 bp, synthetic construct; identical to SEQ ID NO: 72
  source 1..100: mol_type = other DNA
  modified_base 1..2: mod_base = OTHER; note = 2'-O-methyl ribonucleotide
  modified_base 21: mod_base = OTHER; note = 2'-O-methyl ribonucleotide
  modified_base 28..32: mod_base = OTHER; note = 2'-O-methyl ribonucleotide
  modified_base 34..42: mod_base = OTHER; note = 2'-O-methyl ribonucleotide
  modified_base 46: mod_base = OTHER; note = 2'-O-methyl ribonucleotide
  modified_base 48: mod_base = OTHER; note = 2'-O-methyl ribonucleotide
  modified_base 50: mod_base = OTHER; note = 2'-O-methyl ribonucleotide
  modified_base 52..57: mod_base = OTHER; note = 2'-O-methyl ribonucleotide
  modified_base 60..61: mod_base = OTHER; note = 2'-O-methyl ribonucleotide
  modified_base 66..67: mod_base = OTHER; note = 2'-O-methyl ribonucleotide
  modified_base 70..72: mod_base = OTHER; note = 2'-O-methyl ribonucleotide
  modified_base 74..81: mod_base = OTHER; note = 2'-O-methyl ribonucleotide
  modified_base 83..100: mod_base = OTHER; note = 2'-O-methyl ribonucleotide
  modified_base 1..4: mod_base = OTHER; note = phosphorothioate linkage
  modified_base 97..100: mod_base = OTHER; note = phosphorothioate linkage
  misc_feature 1..2: note = RNA
  misc_feature 3..11: note = DNA
  misc_feature 12: note = RNA
  misc_feature 13: note = DNA
  misc_feature 14: note = RNA
  misc_feature 15: note = DNA
  misc_feature 16: note = RNA
  misc_feature 17: note = DNA
  misc_feature 18: note = RNA
  misc_feature 19: note = DNA
  misc_feature 20..100: note = RNA

SEQ ID NO: 487 - DNA, 100 bp, synthetic construct; identical to SEQ ID NO: 72
  source 1..100: mol_type = other DNA
  modified_base 1..2: mod_base = OTHER; note = 2'-O-methyl ribonucleotide
  modified_base 21: mod_base = OTHER; note = 2'-O-methyl ribonucleotide
  modified_base 28..32: mod_base = OTHER; note = 2'-O-methyl ribonucleotide
  modified_base 34..42: mod_base = OTHER; note = 2'-O-methyl ribonucleotide
  modified_base 46: mod_base = OTHER; note = 2'-O-methyl ribonucleotide
  modified_base 48: mod_base = OTHER; note = 2'-O-methyl ribonucleotide
  modified_base 50: mod_base = OTHER; note = 2'-O-methyl ribonucleotide
  modified_base 52..57: mod_base = OTHER; note = 2'-O-methyl ribonucleotide
  modified_base 60..61: mod_base = OTHER; note = 2'-O-methyl ribonucleotide
  modified_base 66..67: mod_base = OTHER; note = 2'-O-methyl ribonucleotide
  modified_base 70..72: mod_base = OTHER; note = 2'-O-methyl ribonucleotide
  modified_base 74..81: mod_base = OTHER; note = 2'-O-methyl ribonucleotide
  modified_base 83..100: mod_base = OTHER; note = 2'-O-methyl ribonucleotide
  modified_base 1..4: mod_base = OTHER; note = phosphorothioate linkage
  modified_base 97..100: mod_base = OTHER; note = phosphorothioate linkage
  misc_feature 1..2: note = RNA
  misc_feature 3..13: note = DNA
  misc_feature 14: note = RNA
  misc_feature 15: note = DNA
  misc_feature 16: note = RNA
  misc_feature 17: note = DNA
  misc_feature 18: note = RNA
  misc_feature 19: note = DNA
  misc_feature 20..100: note = RNA

SEQ ID NO: 488 - DNA, 100 bp, synthetic construct; identical to SEQ ID NO: 72
  source 1..100: mol_type = other DNA
  modified_base 1..2: mod_base = OTHER; note = 2'-O-methyl ribonucleotide
  modified_base 21: mod_base = OTHER; note = 2'-O-methyl ribonucleotide
  modified_base 28..32: mod_base = OTHER; note = 2'-O-methyl ribonucleotide
  modified_base 34..42: mod_base = OTHER; note = 2'-O-methyl ribonucleotide
  modified_base 46: mod_base = OTHER; note = 2'-O-methyl ribonucleotide
  modified_base 48: mod_base = OTHER; note = 2'-O-methyl ribonucleotide
  modified_base 50: mod_base = OTHER; note = 2'-O-methyl ribonucleotide
  modified_base 52..57: mod_base = OTHER; note = 2'-O-methyl ribonucleotide
  modified_base 60..61: mod_base = OTHER; note = 2'-O-methyl ribonucleotide
  modified_base 66..67: mod_base = OTHER; note = 2'-O-methyl ribonucleotide
  modified_base 70..72: mod_base = OTHER; note = 2'-O-methyl ribonucleotide
  modified_base 74..81: mod_base = OTHER; note = 2'-O-methyl ribonucleotide
  modified_base 83..100: mod_base = OTHER; note = 2'-O-methyl ribonucleotide
  modified_base 1..4: mod_base = OTHER; note = phosphorothioate linkage
  modified_base 97..100: mod_base = OTHER; note = phosphorothioate linkage
  misc_feature 1..2: note = RNA
  misc_feature 3..15: note = DNA
  misc_feature 16: note = RNA
  misc_feature 17: note = DNA
  misc_feature 18: note = RNA
  misc_feature 19: note = DNA
  misc_feature 20..100: note = RNA

SEQ ID NO: 489 - DNA, 100 bp, synthetic construct; identical to SEQ ID NO: 72
  source 1..100: mol_type = other DNA
  modified_base 1..2: mod_base = OTHER; note = 2'-O-methyl ribonucleotide
  modified_base 21: mod_base = OTHER; note = 2'-O-methyl ribonucleotide
  modified_base 28..32: mod_base = OTHER; note = 2'-O-methyl ribonucleotide
  modified_base 34..42: mod_base = OTHER; note = 2'-O-methyl ribonucleotide
  modified_base 46: mod_base = OTHER; note = 2'-O-methyl ribonucleotide
  modified_base 48: mod_base = OTHER; note = 2'-O-methyl ribonucleotide
  modified_base 50: mod_base = OTHER; note = 2'-O-methyl ribonucleotide
  modified_base 52..57: mod_base = OTHER; note = 2'-O-methyl ribonucleotide
  modified_base 60..61: mod_base = OTHER; note = 2'-O-methyl ribonucleotide
  modified_base 66..67: mod_base = OTHER; note = 2'-O-methyl ribonucleotide
  modified_base 70..72: mod_base = OTHER; note = 2'-O-methyl ribonucleotide
  modified_base 74..81: mod_base = OTHER; note = 2'-O-methyl ribonucleotide
  modified_base 83..100: mod_base = OTHER; note = 2'-O-methyl ribonucleotide
  modified_base 1..4: mod_base = OTHER; note = phosphorothioate linkage
  modified_base 97..100: mod_base = OTHER; note = phosphorothioate linkage
  misc_feature 1..2: note = RNA
  misc_feature 3..17: note = DNA
  misc_feature 18: note = RNA
  misc_feature 19: note = DNA
  misc_feature 20..100: note = RNA

SEQ ID NO: 490 - DNA, 100 bp, synthetic construct; identical to SEQ ID NO: 72
  source 1..100: mol_type = other DNA
  modified_base 1..2: mod_base = OTHER; note = 2'-O-methyl ribonucleotide
  modified_base 21: mod_base = OTHER; note = 2'-O-methyl ribonucleotide
  modified_base 28..32: mod_base = OTHER; note = 2'-O-methyl ribonucleotide
  modified_base 34..42: mod_base = OTHER; note = 2'-O-methyl ribonucleotide
  modified_base 46: mod_base = OTHER; note = 2'-O-methyl ribonucleotide
  modified_base 48: mod_base = OTHER; note = 2'-O-methyl ribonucleotide
  modified_base 50: mod_base = OTHER; note = 2'-O-methyl ribonucleotide
  modified_base 52..57: mod_base = OTHER; note = 2'-O-methyl ribonucleotide
  modified_base 60..61: mod_base = OTHER; note = 2'-O-methyl ribonucleotide
  modified_base 66..67: mod_base = OTHER; note = 2'-O-methyl ribonucleotide
  modified_base 70..72: mod_base = OTHER; note = 2'-O-methyl ribonucleotide
  modified_base 74..81: mod_base = OTHER; note = 2'-O-methyl ribonucleotide
  modified_base 83..100: mod_base = OTHER; note = 2'-O-methyl ribonucleotide
  modified_base 1..4: mod_base = OTHER; note = phosphorothioate linkage
  modified_base 97..100: mod_base = OTHER; note = phosphorothioate linkage
  misc_feature 1..2: note = RNA
  misc_feature 3..19: note = DNA
  misc_feature 20..100: note = RNA

SEQ ID NO: 491 - DNA, 100 bp, synthetic construct; identical to SEQ ID NO: 72
  source 1..100: mol_type = other DNA
  modified_base 1..3: mod_base = OTHER; note = 2'-O-methyl ribonucleotide
  modified_base 21: mod_base = OTHER; note = 2'-O-methyl ribonucleotide
  modified_base 28..32: mod_base = OTHER; note = 2'-O-methyl ribonucleotide
  modified_base 34..42: mod_base = OTHER; note = 2'-O-methyl ribonucleotide
  modified_base 46: mod_base = OTHER; note = 2'-O-methyl ribonucleotide
  modified_base 48: mod_base = OTHER; note = 2'-O-methyl ribonucleotide
  modified_base 50: mod_base = OTHER; note = 2'-O-methyl ribonucleotide
  modified_base 52..57: mod_base = OTHER; note = 2'-O-methyl ribonucleotide
  modified_base 60..61: mod_base = OTHER; note = 2'-O-methyl ribonucleotide
  modified_base 66..67: mod_base = OTHER; note = 2'-O-methyl ribonucleotide
  modified_base 70..72: mod_base = OTHER; note = 2'-O-methyl ribonucleotide
  modified_base 74..81: mod_base = OTHER; note = 2'-O-methyl ribonucleotide
  modified_base 83..100: mod_base = OTHER; note = 2'-O-methyl ribonucleotide
  modified_base 1..4: mod_base = OTHER; note = phosphorothioate linkage
  modified_base 97..100: mod_base = OTHER; note = phosphorothioate linkage
  misc_feature 1..3: note = RNA
  misc_feature 4..8: note = DNA
  misc_feature 9: note = RNA
  misc_feature 10: note = DNA
  misc_feature 11: note = RNA
  misc_feature 12: note = DNA
  misc_feature 13: note = RNA
  misc_feature 14: note = DNA
  misc_feature 15: note = RNA
  misc_feature 16: note = DNA
  misc_feature 17: note = RNA
  misc_feature 18: note = DNA
  misc_feature 19: note = RNA
  misc_feature 20: note = DNA
  misc_feature 21..100: note = RNA

SEQ ID NO: 492 - DNA, 100 bp, synthetic construct; identical to SEQ ID NO: 72
  source 1..100: mol_type = other DNA
  modified_base 1..3: mod_base = OTHER; note = 2'-O-methyl ribonucleotide
  modified_base 21: mod_base = OTHER; note = 2'-O-methyl ribonucleotide
  modified_base 28..32: mod_base = OTHER; note = 2'-O-methyl ribonucleotide
  modified_base 34..42: mod_base = OTHER; note = 2'-O-methyl ribonucleotide
  modified_base 46: mod_base = OTHER; note = 2'-O-methyl ribonucleotide
  modified_base 48: mod_base = OTHER; note = 2'-O-methyl ribonucleotide
  modified_base 50: mod_base = OTHER; note = 2'-O-methyl ribonucleotide
  modified_base 52..57: mod_base = OTHER; note = 2'-O-methyl ribonucleotide
  modified_base 60..61: mod_base = OTHER; note = 2'-O-methyl ribonucleotide
  modified_base 66..67: mod_base = OTHER; note = 2'-O-methyl ribonucleotide
  modified_base 70..72: mod_base = OTHER; note = 2'-O-methyl ribonucleotide
  modified_base 74..81: mod_base = OTHER; note = 2'-O-methyl ribonucleotide
  modified_base 83..100: mod_base = OTHER; note = 2'-O-methyl ribonucleotide
  modified_base 1..4: mod_base = OTHER; note = phosphorothioate linkage
  modified_base 97..100: mod_base = OTHER; note = phosphorothioate linkage
  misc_feature 1..3: note = RNA
  misc_feature 4..10: note = DNA
  misc_feature 11: note = RNA
  misc_feature 12: note = DNA
  misc_feature 13: note = RNA
  misc_feature 14: note = DNA
  misc_feature 15: note = RNA
  misc_feature 16: note = DNA
  misc_feature 17: note = RNA
  misc_feature 18: note = DNA
  misc_feature 19: note = RNA
  misc_feature 20: note = DNA
  misc_feature 21..100: note = RNA

SEQ ID NO: 493 - DNA, 100 bp, synthetic construct; identical to SEQ ID NO: 72
  source 1..100: mol_type = other DNA
  modified_base 1..3: mod_base = OTHER; note = 2'-O-methyl ribonucleotide
  modified_base 21: mod_base = OTHER; note = 2'-O-methyl ribonucleotide
  modified_base 28..32: mod_base = OTHER; note = 2'-O-methyl ribonucleotide
  modified_base 34..42: mod_base = OTHER; note = 2'-O-methyl ribonucleotide
  modified_base 46: mod_base = OTHER; note = 2'-O-methyl ribonucleotide
  modified_base 48: mod_base = OTHER; note = 2'-O-methyl ribonucleotide
  modified_base 50: mod_base = OTHER; note = 2'-O-methyl ribonucleotide
  modified_base 52..57: mod_base = OTHER; note = 2'-O-methyl ribonucleotide
  modified_base 60..61: mod_base = OTHER; note = 2'-O-methyl ribonucleotide
  modified_base 66..67: mod_base = OTHER; note = 2'-O-methyl ribonucleotide
  modified_base 70..72: mod_base = OTHER; note = 2'-O-methyl ribonucleotide
  modified_base 74..81: mod_base = OTHER; note = 2'-O-methyl ribonucleotide
  modified_base 83..100: mod_base = OTHER; note = 2'-O-methyl ribonucleotide
  modified_base 1..4: mod_base = OTHER; note = phosphorothioate linkage
  modified_base 97..100: mod_base = OTHER; note = phosphorothioate linkage
  misc_feature 1..3: note = RNA
  misc_feature 4..12: note = DNA
  misc_feature 13: note = RNA
  misc_feature 14: note = DNA
  misc_feature 15: note = RNA
  misc_feature 16: note = DNA
  misc_feature 17: note = RNA
  misc_feature 18: note = DNA
  misc_feature 19: note = RNA
  misc_feature 20: note = DNA
  misc_feature 21..100: note = RNA

SEQ ID NO: 494 - DNA, 100 bp, synthetic construct; identical to SEQ ID NO: 72
  source 1..100: mol_type = other DNA
  modified_base 1..3: mod_base = OTHER; note = 2'-O-methyl ribonucleotide
  modified_base 21: mod_base = OTHER; note = 2'-O-methyl ribonucleotide
  modified_base 28..32: mod_base = OTHER; note = 2'-O-methyl ribonucleotide
  modified_base 34..42: mod_base = OTHER; note = 2'-O-methyl ribonucleotide
  modified_base 46: mod_base = OTHER; note = 2'-O-methyl ribonucleotide
  modified_base 48: mod_base = OTHER; note = 2'-O-methyl ribonucleotide
  modified_base 50: mod_base = OTHER; note = 2'-O-methyl ribonucleotide
  modified_base 52..57: mod_base = OTHER; note = 2'-O-methyl ribonucleotide
  modified_base 60..61: mod_base = OTHER; note = 2'-O-methyl ribonucleotide
  modified_base 66..67: mod_base = OTHER; note = 2'-O-methyl ribonucleotide
  modified_base 70..72: mod_base = OTHER; note = 2'-O-methyl ribonucleotide
  modified_base 74..81: mod_base = OTHER; note = 2'-O-methyl ribonucleotide
  modified_base 83..100: mod_base = OTHER; note = 2'-O-methyl ribonucleotide
  modified_base 1..4: mod_base = OTHER; note = phosphorothioate linkage
  modified_base 97..100: mod_base = OTHER; note = phosphorothioate linkage
  misc_feature 1..3: note = RNA
  misc_feature 4..14: note = DNA
  misc_feature 15: note = RNA
  misc_feature 16: note = DNA
  misc_feature 17: note = RNA
  misc_feature 18: note = DNA
  misc_feature 19: note = RNA
  misc_feature 20: note = DNA
  misc_feature 21: note = RNA

SEQ ID NO: 495 - DNA, 100 bp, synthetic construct; identical to SEQ ID NO: 72
  source 1..100: mol_type = other DNA
  modified_base 1..3: mod_base = OTHER; note = 2'-O-methyl ribonucleotide
  modified_base 21: mod_base = OTHER; note = 2'-O-methyl ribonucleotide
  modified_base 28..32: mod_base = OTHER; note = 2'-O-methyl ribonucleotide
  modified_base 34..42: mod_base = OTHER; note = 2'-O-methyl ribonucleotide
  modified_base 46: mod_base = OTHER; note = 2'-O-methyl ribonucleotide
  modified_base 48: mod_base = OTHER; note = 2'-O-methyl ribonucleotide
  modified_base 50: mod_base = OTHER; note = 2'-O-methyl ribonucleotide
  modified_base 52..57: mod_base = OTHER; note = 2'-O-methyl ribonucleotide
  modified_base 60..61: mod_base = OTHER; note = 2'-O-methyl ribonucleotide
  modified_base 66..67: mod_base = OTHER; note = 2'-O-methyl ribonucleotide
  modified_base 70..72: mod_base = OTHER; note = 2'-O-methyl ribonucleotide
  modified_base 74..81: mod_base = OTHER; note = 2'-O-methyl ribonucleotide
  modified_base 83..100: mod_base = OTHER; note = 2'-O-methyl ribonucleotide
  modified_base 1..4: mod_base = OTHER; note = phosphorothioate linkage
  modified_base 97..100: mod_base = OTHER; note = phosphorothioate linkage
  misc_feature 1..3: note = RNA
  misc_feature 4..16: note = DNA
  misc_feature 17: note = RNA
  misc_feature 18: note = DNA
  misc_feature 19: note = RNA
  misc_feature 20: note = DNA
  misc_feature 21..100: note = RNA

SEQ ID NO: 496 - DNA, 100 bp, synthetic construct; identical to SEQ ID NO: 72
  source 1..100: mol_type = other DNA
  modified_base 1..3: mod_base = OTHER; note = 2'-O-methyl ribonucleotide
  modified_base 21: mod_base = OTHER; note = 2'-O-methyl ribonucleotide
  modified_base 28..32: mod_base = OTHER; note = 2'-O-methyl ribonucleotide
  modified_base 34..42: mod_base = OTHER; note = 2'-O-methyl ribonucleotide
  modified_base 46: mod_base = OTHER; note = 2'-O-methyl ribonucleotide
  modified_base 48: mod_base = OTHER; note = 2'-O-methyl ribonucleotide
  modified_base 50: mod_base = OTHER; note = 2'-O-methyl ribonucleotide
  modified_base 52..57: mod_base = OTHER; note = 2'-O-methyl ribonucleotide
  modified_base 60..61: mod_base = OTHER; note = 2'-O-methyl ribonucleotide
  modified_base 66..67: mod_base = OTHER; note = 2'-O-methyl ribonucleotide
  modified_base 70..72: mod_base = OTHER; note = 2'-O-methyl ribonucleotide
  modified_base 74..81: mod_base = OTHER; note = 2'-O-methyl ribonucleotide
  modified_base 83..100: mod_base = OTHER; note = 2'-O-methyl ribonucleotide
  modified_base 1..4: mod_base = OTHER; note = phosphorothioate linkage
  modified_base 97..100: mod_base = OTHER; note = phosphorothioate linkage
  misc_feature 1..3: note = RNA
  misc_feature 4..18: note = DNA
  misc_feature 19: note = RNA
  misc_feature 20: note = DNA
  misc_feature 21..100: note = RNA

SEQ ID NO: 497 - DNA, 100 bp, synthetic construct; identical to SEQ ID NO: 72
  source 1..100: mol_type = other DNA
  modified_base 1..3: mod_base = OTHER; note = 2'-O-methyl ribonucleotide
  modified_base 21: mod_base = OTHER; note = 2'-O-methyl ribonucleotide
  modified_base 28..32: mod_base = OTHER; note = 2'-O-methyl ribonucleotide
  modified_base 34..42: mod_base = OTHER; note = 2'-O-methyl ribonucleotide
  modified_base 46: mod_base = OTHER; note = 2'-O-methyl ribonucleotide
  modified_base 48: mod_base = OTHER; note = 2'-O-methyl ribonucleotide
  modified_base 50: mod_base = OTHER; note = 2'-O-methyl ribonucleotide
  modified_base 52..57: mod_base = OTHER; note = 2'-O-methyl ribonucleotide
  modified_base 60..61: mod_base = OTHER; note = 2'-O-methyl ribonucleotide
  modified_base 66..67: mod_base = OTHER; note = 2'-O-methyl ribonucleotide
  modified_base 70..72: mod_base = OTHER; note = 2'-O-methyl ribonucleotide
  modified_base 74..81: mod_base = OTHER; note = 2'-O-methyl ribonucleotide
  modified_base 83..100: mod_base = OTHER; note = 2'-O-methyl ribonucleotide
  modified_base 1..4: mod_base = OTHER; note = phosphorothioate linkage
  modified_base 97..100: mod_base = OTHER; note = phosphorothioate linkage
  misc_feature 1..3: note = RNA
  misc_feature 4..20: note = DNA
  misc_feature 21..100: note = RNA

SEQ ID NO: 498 - DNA, 100 bp, synthetic construct; identical to SEQ ID NO: 72
  source 1..100: mol_type = other DNA
  modified_base 1..3: mod_base = OTHER; note = 2'-O-methyl ribonucleotide
  modified_base 21: mod_base = OTHER; note = 2'-O-methyl ribonucleotide
  modified_base 28..32: mod_base = OTHER; note = 2'-O-methyl ribonucleotide
  modified_base 34..42: mod_base = OTHER; note = 2'-O-methyl ribonucleotide
  modified_base 46: mod_base = OTHER; note = 2'-O-methyl ribonucleotide
  modified_base 48: mod_base = OTHER; note = 2'-O-methyl ribonucleotide
  modified_base 50: mod_base = OTHER; note = 2'-O-methyl ribonucleotide
  modified_base 52..57: mod_base = OTHER; note = 2'-O-methyl ribonucleotide
  modified_base 60..61: mod_base = OTHER; note = 2'-O-methyl ribonucleotide
  modified_base 66..67: mod_base = OTHER; note = 2'-O-methyl ribonucleotide
  modified_base 70..72: mod_base = OTHER; note = 2'-O-methyl ribonucleotide
  modified_base 74..81: mod_base = OTHER; note = 2'-O-methyl ribonucleotide
  modified_base 83..100: mod_base = OTHER; note = 2'-O-methyl ribonucleotide
  modified_base 1..4: mod_base = OTHER; note = phosphorothioate linkage
  modified_base 97..100: mod_base = OTHER; note = phosphorothioate linkage
  misc_feature 1..3: note = RNA
  misc_feature 4..7: note = DNA
  misc_feature 8: note = RNA
  misc_feature 9: note = DNA
  misc_feature 10: note = RNA
  misc_feature 11: note = DNA
  misc_feature 12: note = RNA
  misc_feature 13: note = DNA
  misc_feature 14: note = RNA
  misc_feature 15: note = DNA
  misc_feature 16: note = RNA
  misc_feature 17: note = DNA
  misc_feature 18: note = RNA
  misc_feature 19: note = DNA
  misc_feature 20..100: note = RNA

SEQ ID NO: 499 - DNA, 100 bp, synthetic construct; identical to SEQ ID NO: 72
  source 1..100: mol_type = other DNA
  modified_base 1..3: mod_base = OTHER; note = 2'-O-methyl ribonucleotide
  modified_base 21: mod_base = OTHER; note = 2'-O-methyl ribonucleotide
  modified_base 28..32: mod_base = OTHER; note = 2'-O-methyl ribonucleotide
  modified_base 34..42: mod_base = OTHER; note = 2'-O-methyl ribonucleotide
  modified_base 46: mod_base = OTHER; note = 2'-O-methyl ribonucleotide
  modified_base 48: mod_base = OTHER; note = 2'-O-methyl ribonucleotide
  modified_base 50: mod_base = OTHER; note = 2'-O-methyl ribonucleotide
  modified_base 52..57: mod_base = OTHER; note = 2'-O-methyl ribonucleotide
  modified_base 60..61: mod_base = OTHER; note = 2'-O-methyl ribonucleotide
  modified_base 66..67: mod_base = OTHER; note = 2'-O-methyl ribonucleotide
  modified_base 70..72: mod_base = OTHER; note = 2'-O-methyl ribonucleotide
  modified_base 74..81: mod_base = OTHER; note = 2'-O-methyl ribonucleotide
  modified_base 83..100: mod_base = OTHER; note = 2'-O-methyl ribonucleotide
  modified_base 1..4: mod_base = OTHER; note = phosphorothioate linkage
  modified_base 97..100: mod_base = OTHER; note = phosphorothioate linkage
  misc_feature 1..3: note = RNA
  misc_feature 4..9: note = DNA
  misc_feature 10: note = RNA
  misc_feature 11: note = DNA
  misc_feature 12: note = RNA
  misc_feature 13: note = DNA
  misc_feature 14: note = RNA
  misc_feature 15: note = DNA
  misc_feature 16: note = RNA
  misc_feature 17: note = DNA
  misc_feature 18: note = RNA
  misc_feature 19: note = DNA
  misc_feature 20..100: note = RNA

SEQ ID NO: 500 - DNA, 100 bp, synthetic construct; identical to SEQ ID NO: 72
  source 1..100: mol_type = other DNA
  modified_base 1..3: mod_base = OTHER; note = 2'-O-methyl ribonucleotide
  modified_base 21: mod_base = OTHER; note = 2'-O-methyl ribonucleotide
  modified_base 28..32: mod_base = OTHER; note = 2'-O-methyl ribonucleotide
  modified_base 34..42: mod_base = OTHER; note = 2'-O-methyl ribonucleotide
  modified_base 46: mod_base = OTHER; note = 2'-O-methyl ribonucleotide
  modified_base 48: mod_base = OTHER; note = 2'-O-methyl ribonucleotide
  modified_base 50: mod_base = OTHER; note = 2'-O-methyl ribonucleotide
  modified_base 52..57: mod_base = OTHER; note = 2'-O-methyl ribonucleotide
  modified_base 60..61: mod_base = OTHER; note = 2'-O-methyl ribonucleotide
  modified_base 66..67: mod_base = OTHER; note = 2'-O-methyl ribonucleotide
  modified_base 70..72: mod_base = OTHER; note = 2'-O-methyl ribonucleotide
  modified_base 74..81: mod_base = OTHER; note = 2'-O-methyl ribonucleotide
  modified_base 83..100: mod_base = OTHER; note = 2'-O-methyl ribonucleotide
  modified_base 1..4: mod_base = OTHER; note = phosphorothioate linkage
  modified_base 97..100: mod_base = OTHER; note = phosphorothioate linkage
  misc_feature 1..3: note = RNA
  misc_feature 4..11: note = DNA
  misc_feature 12: note = RNA
  misc_feature 13: note = DNA
  misc_feature 14: note = RNA
  misc_feature 15: note = DNA
  misc_feature 16: note = RNA
  misc_feature 17: note = DNA
  misc_feature 18: note = RNA
  misc_feature 19: note = DNA
  misc_feature 20..100: note = RNA

SEQ ID NO: 501 - DNA, 100 bp, synthetic construct; identical to SEQ ID NO: 72
  source 1..100: mol_type = other DNA
  modified_base 1..3: mod_base = OTHER; note = 2'-O-methyl ribonucleotide
  modified_base 21: mod_base = OTHER; note = 2'-O-methyl ribonucleotide
  modified_base 28..32: mod_base = OTHER; note = 2'-O-methyl ribonucleotide
  modified_base 34..42: mod_base = OTHER; note = 2'-O-methyl ribonucleotide
  modified_base 46: mod_base = OTHER; note = 2'-O-methyl ribonucleotide
  modified_base 48: mod_base = OTHER; note = 2'-O-methyl ribonucleotide
  modified_base 50: mod_base = OTHER; note = 2'-O-methyl ribonucleotide
  modified_base 52..57: mod_base = OTHER; note = 2'-O-methyl ribonucleotide
  modified_base 60..61: mod_base = OTHER; note = 2'-O-methyl ribonucleotide
  modified_base 66..67: mod_base = OTHER; note = 2'-O-methyl ribonucleotide
  modified_base 70..72: mod_base = OTHER; note = 2'-O-methyl ribonucleotide
  modified_base 74..81: mod_base = OTHER; note = 2'-O-methyl ribonucleotide
  modified_base 83..100: mod_base = OTHER; note = 2'-O-methyl ribonucleotide
  modified_base 1..4: mod_base = OTHER; note = phosphorothioate linkage
  modified_base 97..100: mod_base = OTHER; note = phosphorothioate linkage
  misc_feature 1..3: note = RNA
  misc_feature 4..13: note = DNA
  misc_feature 14: note = RNA
  misc_feature 15: note = DNA
  misc_feature 16: note = RNA
  misc_feature 17: note = DNA
  misc_feature 18: note = RNA
  misc_feature 19: note = DNA
  misc_feature 20..100: note = RNA

SEQ ID NO: 502 - DNA, 100 bp, synthetic construct; identical to SEQ ID NO: 72
  source 1..100: mol_type = other DNA
  modified_base 1..3: mod_base = OTHER; note = 2'-O-methyl ribonucleotide
  modified_base 21: mod_base = OTHER; note = 2'-O-methyl ribonucleotide
  modified_base 28..32: mod_base = OTHER; note = 2'-O-methyl ribonucleotide
  modified_base 34..42: mod_base = OTHER; note = 2'-O-methyl ribonucleotide
  modified_base 46: mod_base = OTHER; note = 2'-O-methyl ribonucleotide
  modified_base 48: mod_base = OTHER; note = 2'-O-methyl ribonucleotide
  modified_base 50: mod_base = OTHER; note = 2'-O-methyl ribonucleotide
  modified_base 52..57: mod_base = OTHER; note = 2'-O-methyl ribonucleotide
  modified_base 60..61: mod_base = OTHER; note = 2'-O-methyl ribonucleotide
  modified_base 66..67: mod_base = OTHER; note = 2'-O-methyl ribonucleotide
  modified_base 70..72: mod_base = OTHER; note = 2'-O-methyl ribonucleotide
  modified_base 74..81: mod_base = OTHER; note = 2'-O-methyl ribonucleotide
  modified_base 83..100: mod_base = OTHER; note = 2'-O-methyl ribonucleotide
  modified_base 1..4: mod_base = OTHER; note = phosphorothioate linkage
  modified_base 97..100: mod_base = OTHER; note = phosphorothioate linkage
  misc_feature 1..3: note = RNA
  misc_feature 4..15: note = DNA
  misc_feature 16: note = RNA
  misc_feature 17: note = DNA
  misc_feature 18: note = RNA
  misc_feature 19: note = DNA
  misc_feature 20..100: note = RNA

SEQ ID NO: 503 - DNA, 100 bp, synthetic construct; identical to SEQ ID NO: 72
  source 1..100: mol_type = other DNA
  modified_base 1..3: mod_base = OTHER; note = 2'-O-methyl ribonucleotide
  modified_base 21: mod_base = OTHER; note = 2'-O-methyl ribonucleotide
  modified_base 28..32: mod_base = OTHER; note = 2'-O-methyl ribonucleotide
  modified_base 34..42: mod_base = OTHER; note = 2'-O-methyl ribonucleotide
  modified_base 46: mod_base = OTHER; note = 2'-O-methyl ribonucleotide
  modified_base 48: mod_base = OTHER; note = 2'-O-methyl ribonucleotide
  modified_base 50: mod_base = OTHER; note = 2'-O-methyl ribonucleotide
  modified_base 52..57: mod_base = OTHER; note = 2'-O-methyl ribonucleotide
  modified_base 60..61: mod_base = OTHER; note = 2'-O-methyl ribonucleotide
  modified_base 66..67: mod_base = OTHER; note = 2'-O-methyl ribonucleotide
  modified_base 70..72: mod_base = OTHER; note = 2'-O-methyl ribonucleotide
  modified_base 74..81: mod_base = OTHER; note = 2'-O-methyl ribonucleotide
  modified_base 83..100: mod_base = OTHER; note = 2'-O-methyl ribonucleotide
  modified_base 1..4: mod_base = OTHER; note = phosphorothioate linkage
  modified_base 97..100: mod_base = OTHER; note = phosphorothioate linkage
  misc_feature 1..3: note = RNA
  misc_feature 4..17: note = DNA
  misc_feature 18: note = RNA
  misc_feature 19: note = DNA
  misc_feature 20..100: note = RNA

SEQ ID NO: 504 - DNA, 100 bp, synthetic construct; identical to SEQ ID NO: 72
  source 1..100: mol_type = other DNA
  modified_base 1..3: mod_base = OTHER; note = 2'-O-methyl ribonucleotide
  modified_base 21: mod_base = OTHER; note = 2'-O-methyl ribonucleotide
  modified_base 28..32: mod_base = OTHER; note = 2'-O-methyl ribonucleotide
  modified_base 34..42: mod_base = OTHER; note = 2'-O-methyl ribonucleotide
  modified_base 46: mod_base = OTHER; note = 2'-O-methyl ribonucleotide
  modified_base 48: mod_base = OTHER; note = 2'-O-methyl ribonucleotide
  modified_base 50: mod_base = OTHER; note = 2'-O-methyl ribonucleotide
  modified_base 52..57: mod_base = OTHER; note = 2'-O-methyl ribonucleotide
  modified_base 60..61: mod_base = OTHER; note = 2'-O-methyl ribonucleotide
  modified_base 66..67: mod_base = OTHER; note = 2'-O-methyl ribonucleotide
  modified_base 70..72: mod_base = OTHER; note = 2'-O-methyl ribonucleotide
  modified_base 74..81: mod_base = OTHER; note = 2'-O-methyl ribonucleotide
  modified_base 83..100: mod_base = OTHER; note = 2'-O-methyl ribonucleotide
  modified_base 1..4: mod_base = OTHER; note = phosphorothioate linkage
  modified_base 97..100: mod_base = OTHER; note = phosphorothioate linkage
  misc_feature 1..3: note = RNA
  misc_feature 4..19: note = DNA
  misc_feature 20..100: note = RNA

SEQ ID NO: 505 - DNA, 100 bp, synthetic construct; identical to SEQ ID NO: 72
  source 1..100: mol_type = other DNA
  modified_base 1..3: mod_base = OTHER; note = 2'-O-methyl ribonucleotide
  modified_base 21: mod_base = OTHER; note = 2'-O-methyl ribonucleotide
  modified_base 28..32: mod_base = OTHER; note = 2'-O-methyl ribonucleotide
  modified_base 34..42: mod_base = OTHER; note = 2'-O-methyl ribonucleotide
  modified_base 46: mod_base = OTHER; note = 2'-O-methyl ribonucleotide
  modified_base 48: mod_base = OTHER; note = 2'-O-methyl ribonucleotide
  modified_base 50: mod_base = OTHER; note = 2'-O-methyl ribonucleotide
  modified_base 52..57: mod_base = OTHER; note = 2'-O-methyl ribonucleotide
  modified_base 60..61: mod_base = OTHER; note = 2'-O-methyl ribonucleotide
  modified_base 66..67: mod_base = OTHER; note = 2'-O-methyl ribonucleotide
  modified_base 70..72: mod_base = OTHER; note = 2'-O-methyl ribonucleotide
  modified_base 74..81: mod_base = OTHER; note = 2'-O-methyl ribonucleotide
  modified_base 83..100: mod_base = OTHER; note = 2'-O-methyl ribonucleotide
  modified_base 1..4: mod_base = OTHER; note = phosphorothioate linkage
  modified_base 97..100: mod_base = OTHER; note = phosphorothioate linkage
  misc_feature 1..4: note = RNA
  misc_feature 5: note = DNA
  misc_feature 6..14: note = RNA
  misc_feature 15: note = DNA
  misc_feature 16..100: note = RNA

SEQ ID NO: 506 - DNA, 100 bp, synthetic construct; identical to SEQ ID NO: 72
  source 1..100: mol_type = other DNA
  modified_base 1..3: mod_base = OTHER; note = 2'-O-methyl ribonucleotide
  modified_base 21: mod_base = OTHER; note = 2'-O-methyl ribonucleotide
  modified_base 28..32: mod_base = OTHER; note = 2'-O-methyl ribonucleotide
  modified_base 34..42: mod_base = OTHER; note = 2'-O-methyl ribonucleotide
  modified_base 46: mod_base = OTHER; note = 2'-O-methyl ribonucleotide
  modified_base 48: mod_base = OTHER; note = 2'-O-methyl ribonucleotide
  modified_base 50: mod_base = OTHER; note = 2'-O-methyl ribonucleotide
  modified_base 52..57: mod_base = OTHER; note = 2'-O-methyl ribonucleotide
  modified_base 60..61: mod_base = OTHER; note = 2'-O-methyl ribonucleotide
  modified_base 66..67: mod_base = OTHER; note = 2'-O-methyl ribonucleotide
  modified_base 70..72: mod_base = OTHER; note = 2'-O-methyl ribonucleotide
  modified_base 74..81: mod_base = OTHER; note = 2'-O-methyl ribonucleotide
  modified_base 83..100: mod_base = OTHER; note = 2'-O-methyl ribonucleotide
  modified_base 1..4: mod_base = OTHER; note = phosphorothioate linkage
  modified_base 97..100: mod_base = OTHER; note = phosphorothioate linkage
  misc_feature 1..10: note = RNA
  misc_feature 11: note = DNA
  misc_feature 12..13: note = RNA
  misc_feature 14: note = DNA
  misc_feature 15..18: note = RNA
  misc_feature 19: note = DNA
  misc_feature 20..100: note = RNA

SEQ ID NO: 507 - RNA, 100 nt, synthetic construct; identical to SEQ ID NO: 69
  source 1..100: mol_type = other RNA
  modified_base 1..3: mod_base = OTHER; note = 2'-O-methyl ribonucleotide
  modified_base 21: mod_base = OTHER; note = 2'-O-methyl ribonucleotide
  modified_base 28..32: mod_base = OTHER; note = 2'-O-methyl ribonucleotide
  modified_base 34..42: mod_base = OTHER; note = 2'-O-methyl ribonucleotide
  modified_base 46: mod_base = OTHER; note = 2'-O-methyl ribonucleotide
  modified_base 48: mod_base = OTHER; note = 2'-O-methyl ribonucleotide
  modified_base 50: mod_base = OTHER; note = 2'-O-methyl ribonucleotide
  modified_base 52..57: mod_base = OTHER; note = 2'-O-methyl ribonucleotide
  modified_base 60..61: mod_base = OTHER; note = 2'-O-methyl ribonucleotide
  modified_base 66..67: mod_base = OTHER; note = 2'-O-methyl ribonucleotide
  modified_base 70..72: mod_base = OTHER; note = 2'-O-methyl ribonucleotide
  modified_base 74..81: mod_base = OTHER; note = 2'-O-methyl ribonucleotide
  modified_base 83..100: mod_base = OTHER; note = 2'-O-methyl ribonucleotide
  modified_base 1..4: mod_base = OTHER; note = phosphorothioate linkage
  modified_base 97..100: mod_base = OTHER; note = phosphorothioate linkage

SEQ ID NO: 508 - RNA, 100 nt, synthetic construct
  source 1..100: mol_type = other RNA
  misc_difference 5: note = zebularine or 4-deoxyuridine / 4-deazacytidine
aaganacctgaataaccctcgttttagagctagaaatagcaagttaaaataaggctagtccgttatcaacttgaaaaagtggcaccgagtcggtgctttt

SEQ ID NO: 509 - DNA, 100 bp, synthetic construct; identical to SEQ ID NO: 73
  source 1..100: mol_type = other DNA
  modified_base 1..2: mod_base = OTHER; note = 2'-O-methyl ribonucleotide
  modified_base 21: mod_base = OTHER; note = 2'-O-methyl ribonucleotide
  modified_base 28..32: mod_base = OTHER; note = 2'-O-methyl ribonucleotide
  modified_base 34..42: mod_base = OTHER; note = 2'-O-methyl ribonucleotide
  modified_base 46: mod_base = OTHER; note = 2'-O-methyl ribonucleotide
  modified_base 48: mod_base = OTHER; note = 2'-O-methyl ribonucleotide
  modified_base 50: mod_base = OTHER; note = 2'-O-methyl ribonucleotide
  modified_base 52..57: mod_base = OTHER; note = 2'-O-methyl ribonucleotide
  modified_base 60..61: mod_base = OTHER; note = 2'-O-methyl ribonucleotide
  modified_base 66..67: mod_base = OTHER; note = 2'-O-methyl ribonucleotide
  modified_base 70..72: mod_base = OTHER; note = 2'-O-methyl ribonucleotide
  modified_base 74..81: mod_base = OTHER; note = 2'-O-methyl ribonucleotide
  modified_base 83..100: mod_base = OTHER; note = 2'-O-methyl ribonucleotide
  modified_base 1..4: mod_base = OTHER; note = phosphorothioate linkage
  modified_base 97..100: mod_base = OTHER; note = phosphorothioate linkage
  misc_feature 1..2: note = RNA
  misc_feature 3..6: note = DNA
  misc_feature 7: note = RNA
  misc_feature 8: note = DNA
  misc_feature 9: note = RNA
  misc_feature 10: note = DNA
  misc_feature 11: note = RNA
  misc_feature 12: note = DNA
  misc_feature 13: note = RNA
  misc_feature 14: note = DNA
  misc_feature 15: note = RNA
  misc_feature 16: note = DNA
  misc_feature 17: note = RNA
  misc_feature 18: note = DNA
  misc_feature 19: note = RNA
  misc_feature 20: note = DNA
  misc_feature 21..100: note = RNA

SEQ ID NO: 510 - RNA, 100 nt, synthetic construct
  source 1..100: mol_type = other RNA
  misc_difference 8: note = zebularine or 4-deoxyuridine or 4-deazacytidine
aagatacntgaataaccctcgttttagagctagaaatagcaagttaaaataaggctagtccgttatcaacttgaaaaagtggcaccgagtcggtgctttt

SEQ ID NO: 511 - RNA, 100 nt, synthetic construct
  source 1..100: mol_type = other RNA
  misc_difference 5: note = zebularine or 4-deoxyuridine / 4-deazacytidine
  misc_difference 8: note = zebularine or 4-deoxyuridine / 4-deazacytidine
aaganacntgaataaccctcgttttagagctagaaatagcaagttaaaataaggctagtccgttatcaacttgaaaaagtggcaccgagtcggtgctttt

SEQ ID NO: 512 - RNA, 100 nt, synthetic construct
  source 1..100: mol_type = other RNA
  misc_difference 8: note = zebularine or 4-deoxyuridine / 4-deazacytidine
  misc_difference 17: note = zebularine or 4-deoxyuridine / 4-deazacytidine
aagatacntgaataacnctcgttttagagctagaaatagcaagttaaaataaggctagtccgttatcaacttgaaaaagtggcaccgagtcggtgctttt

SEQ ID NO: 513 - RNA, 100 nt, synthetic construct
  source 1..100: mol_type = other RNA
  misc_difference 8: note = zebularine or 4-deoxyuridine / 4-deazacytidine
  misc_difference 13: note = zebularine or 4-deoxyuridine / 4-deazacytidine
  misc_difference 17: note = zebularine or 4-deoxyuridine / 4-deazacytidine
aagatacntgaanaacnctcgttttagagctagaaatagcaagttaaaataaggctagtccgttatcaacttgaaaaagtggcaccgagtcggtgctttt

SEQ ID NO: 514 - RNA, 100 nt, synthetic construct
  source 1..100: mol_type = other RNA
  misc_difference 5: note = zebularine or 4-deoxyuridine / 4-deazacytidine
  misc_difference 17: note = zebularine or 4-deoxyuridine / 4-deazacytidine
aaganacctgaataacnctcgttttagagctagaaatagcaagttaaaataaggctagtccgttatcaacttgaaaaagtggcaccgagtcggtgctttt

SEQ ID NO: 515 - DNA, 100 bp, synthetic construct; identical to SEQ ID NO: 73
  source 1..100: mol_type = other DNA
  modified_base 1..3: mod_base = OTHER; note = 2'-O-methyl ribonucleotide
  modified_base 21: mod_base = OTHER; note = 2'-O-methyl ribonucleotide
  modified_base 28..32: mod_base = OTHER; note = 2'-O-methyl ribonucleotide
  modified_base 34..42: mod_base = OTHER; note = 2'-O-methyl ribonucleotide
  modified_base 46: mod_base = OTHER; note = 2'-O-methyl ribonucleotide
  modified_base 48: mod_base = OTHER; note = 2'-O-methyl ribonucleotide
  modified_base 50: mod_base = OTHER; note = 2'-O-methyl ribonucleotide
  modified_base 52..57: mod_base = OTHER; note = 2'-O-methyl ribonucleotide
  modified_base 60..61: mod_base = OTHER; note = 2'-O-methyl ribonucleotide
  modified_base 66..67: mod_base = OTHER; note = 2'-O-methyl ribonucleotide
  modified_base 70..72: mod_base = OTHER; note = 2'-O-methyl ribonucleotide
  modified_base 74..81: mod_base = OTHER; note = 2'-O-methyl ribonucleotide
  modified_base 83..100: mod_base = OTHER; note = 2'-O-methyl ribonucleotide
  modified_base 1..4: mod_base = OTHER; note = phosphorothioate linkage
  modified_base 97..100: mod_base = OTHER; note = phosphorothioate linkage
  misc_feature 1..4: note = RNA
  misc_feature 5: note = DNA
  misc_feature 6: note = RNA
  misc_feature 7: note = DNA
  misc_feature 8: note = RNA
  misc_feature 9: note = DNA
  misc_feature 10: note = RNA
  misc_feature 11: note = DNA
  misc_feature 12: note = RNA
  misc_feature 13: note = DNA
  misc_feature 14: note = RNA
  misc_feature 15: note = DNA
  misc_feature 16: note = RNA
  misc_feature 17: note = DNA
  misc_feature 18: note = RNA
  misc_feature 19: note = DNA
  misc_feature 20..100: note = RNA

SEQ ID NO: 516 - DNA, 100 bp, synthetic construct; identical to SEQ ID NO: 73
  source 1..100: mol_type = other DNA
  modified_base 1..3: mod_base = OTHER; note = 2'-O-methyl ribonucleotide
  modified_base 21: mod_base = OTHER; note = 2'-O-methyl ribonucleotide
  modified_base 28..32: mod_base = OTHER; note = 2'-O-methyl ribonucleotide
  modified_base 34..42: mod_base = OTHER; note = 2'-O-methyl ribonucleotide
  modified_base 46: mod_base = OTHER; note = 2'-O-methyl ribonucleotide
  modified_base 48: mod_base = OTHER; note = 2'-O-methyl ribonucleotide
  modified_base 50: mod_base = OTHER; note = 2'-O-methyl ribonucleotide
  modified_base 52..57: mod_base = OTHER; note = 2'-O-methyl ribonucleotide
  modified_base 60..61: mod_base = OTHER; note = 2'-O-methyl ribonucleotide
  modified_base 66..67: mod_base = OTHER; note = 2'-O-methyl ribonucleotide
  modified_base 70..72: mod_base = OTHER; note = 2'-O-methyl ribonucleotide
  modified_base 74..81: mod_base = OTHER; note = 2'-O-methyl ribonucleotide
  modified_base 83..100: mod_base = OTHER; note = 2'-O-methyl ribonucleotide
  modified_base 1..4: mod_base = OTHER; note = phosphorothioate linkage
  modified_base 97..100: mod_base = OTHER; note = phosphorothioate linkage
  misc_feature 1..3: note = RNA
  misc_feature 4: note = DNA
  misc_feature 5: note = RNA
  misc_feature 6: note = DNA
  misc_feature 7: note = RNA
  misc_feature 8: note = DNA
  misc_feature 9: note = RNA
  misc_feature 10: note = DNA
  misc_feature 11: note = RNA
  misc_feature 12: note = DNA
  misc_feature 13: note = RNA
  misc_feature 14: note = DNA
  misc_feature 15: note = RNA
  misc_feature 16: note = DNA
  misc_feature 17: note = RNA
  misc_feature 18: note = DNA
  misc_feature 19: note = RNA
  misc_feature 20: note = DNA
  misc_feature 21..100: note = RNA

SEQ ID NO: 517 - DNA, 100 bp, synthetic construct; identical to SEQ ID NO: 73
  source 1..100: mol_type = other DNA
  modified_base 1..3: mod_base = OTHER; note = 2'-O-methyl ribonucleotide
  modified_base 21: mod_base = OTHER; note = 2'-O-methyl ribonucleotide
  modified_base 28..32: mod_base = OTHER; note = 2'-O-methyl ribonucleotide
  modified_base 34..42: mod_base = OTHER; note = 2'-O-methyl ribonucleotide
  modified_base 46: mod_base = OTHER; note = 2'-O-methyl ribonucleotide
  modified_base 48: mod_base = OTHER; note = 2'-O-methyl ribonucleotide
  modified_base 50: mod_base = OTHER; note = 2'-O-methyl ribonucleotide
  modified_base 52..57: mod_base = OTHER; note = 2'-O-methyl ribonucleotide
  modified_base 60..61: mod_base = OTHER; note = 2'-O-methyl ribonucleotide
  modified_base 66..67: mod_base = OTHER; note = 2'-O-methyl ribonucleotide
  modified_base 70..72: mod_base = OTHER; note = 2'-O-methyl ribonucleotide
  modified_base 74..81: mod_base = OTHER; note = 2'-O-methyl ribonucleotide
  modified_base 83..100: mod_base = OTHER; note = 2'-O-methyl ribonucleotide
  modified_base 1..4: mod_base = OTHER; note = phosphorothioate linkage
  modified_base 97..100: mod_base = OTHER; note = phosphorothioate linkage
  misc_feature 1: note = RNA
  misc_feature 2..6: note = DNA
  misc_feature 7: note = RNA
  misc_feature 8: note = DNA
  misc_feature 9: note = RNA
  misc_feature 10: note = DNA
  misc_feature 11: note = RNA
  misc_feature 12: note = DNA
  misc_feature 13: note = RNA
  misc_feature 14: note = DNA
  misc_feature 15: note = RNA
  misc_feature 16: note = DNA
  misc_feature 17: note = RNA
  misc_feature 18: note = DNA
  misc_feature 19: note = RNA
  misc_feature 20: note = DNA
  misc_feature 21: note = RNA

SEQ ID NO: 518 - DNA, 100 bp, synthetic construct; identical to SEQ ID NO: 73
  source 1..100: mol_type = other DNA
  modified_base 1..2: mod_base = OTHER; note = 2'-O-methyl ribonucleotide
  modified_base 21: mod_base = OTHER; note = 2'-O-methyl ribonucleotide
  modified_base 28..32: mod_base = OTHER; note = 2'-O-methyl ribonucleotide
  modified_base 34..42: mod_base = OTHER; note = 2'-O-methyl ribonucleotide
  modified_base 46: mod_base = OTHER; note = 2'-O-methyl ribonucleotide
  modified_base 48: mod_base = OTHER; note = 2'-O-methyl ribonucleotide
  modified_base 50: mod_base = OTHER; note = 2'-O-methyl ribonucleotide
  modified_base 52..57: mod_base = OTHER; note = 2'-O-methyl ribonucleotide
  modified_base 60..61: mod_base = OTHER; note = 2'-O-methyl ribonucleotide
  modified_base 66..67: mod_base = OTHER; note = 2'-O-methyl ribonucleotide
  modified_base 70..72: mod_base = OTHER; note = 2'-O-methyl ribonucleotide
  modified_base 74..81: mod_base = OTHER; note = 2'-O-methyl ribonucleotide
  modified_base 83..100: mod_base = OTHER; note = 2'-O-methyl ribonucleotide
  modified_base 1..4: mod_base = OTHER; note = phosphorothioate linkage
  modified_base 97..100: mod_base = OTHER; note = phosphorothioate linkage
  misc_feature 1..2: note = RNA
  misc_feature 3..8: note = DNA
  misc_feature 9: note = RNA
  misc_feature 10: note = DNA
  misc_feature 11: note = RNA
  misc_feature 12: note = DNA
  misc_feature 13: note = RNA
  misc_feature 14: note = DNA
  misc_feature 15: note = RNA
  misc_feature 16: note = DNA
  misc_feature 17: note = RNA
  misc_feature 18: note = DNA
  misc_feature 19: note = RNA
  misc_feature 20: note = DNA
  misc_feature 21..100: note = RNA

SEQ ID NO: 519 - DNA, 100 bp, synthetic construct; identical to SEQ ID NO: 73
  source 1..100: mol_type = other DNA
  modified_base 1..3: mod_base = OTHER; note = 2'-O-methyl ribonucleotide
  modified_base 21: mod_base = OTHER; note = 2'-O-methyl ribonucleotide
  modified_base 28..32: mod_base = OTHER; note = 2'-O-methyl ribonucleotide
  modified_base 34..42: mod_base = OTHER; note = 2'-O-methyl ribonucleotide
  modified_base 46: mod_base = OTHER; note = 2'-O-methyl ribonucleotide
  modified_base 48: mod_base = OTHER; note = 2'-O-methyl ribonucleotide
  modified_base 50: mod_base = OTHER; note = 2'-O-methyl ribonucleotide
  modified_base 52..57: mod_base = OTHER; note = 2'-O-methyl ribonucleotide
  modified_base 60..61: mod_base = OTHER; note = 2'-O-methyl ribonucleotide
  modified_base 66..67: mod_base = OTHER; note = 2'-O-methyl ribonucleotide
  modified_base 70..72: mod_base = OTHER; note = 2'-O-methyl ribonucleotide
  modified_base 74..81: mod_base = OTHER; note = 2'-O-methyl ribonucleotide
  modified_base 83..100: mod_base = OTHER; note = 2'-O-methyl ribonucleotide
  modified_base 1..4: mod_base = OTHER; note = phosphorothioate linkage
  modified_base 97..100: mod_base = OTHER; note = phosphorothioate linkage
  misc_feature 1..3: note = RNA
  misc_feature 4..6: note = DNA
  misc_feature 7: note = RNA
  misc_feature 8: note = DNA
  misc_feature 9: note = RNA
  misc_feature 10: note = DNA
  misc_feature 11: note = RNA
  misc_feature 12: note = DNA
  misc_feature 13: note = RNA
  misc_feature 14: note = DNA
  misc_feature 15: note = RNA
  misc_feature 16: note = DNA
  misc_feature 17: note = RNA
  misc_feature 18: note = DNA
  misc_feature 19: note = RNA
  misc_feature 20: note = DNA
  misc_feature 21..100: note = RNA

SEQ ID NO: 520 - DNA, 100 bp, synthetic construct; identical to SEQ ID NO: 73
  source 1..100: mol_type = other DNA
  modified_base 1..2: mod_base = OTHER; note = 2'-O-methyl ribonucleotide
  modified_base 21: mod_base = OTHER; note = 2'-O-methyl ribonucleotide
  modified_base 28..32: mod_base = OTHER; note = 2'-O-methyl ribonucleotide
  modified_base 34..42: mod_base = OTHER; note = 2'-O-methyl ribonucleotide
  modified_base 46: mod_base = OTHER; note = 2'-O-methyl ribonucleotide
  modified_base 48: mod_base = OTHER; note = 2'-O-methyl ribonucleotide
  modified_base 50: mod_base = OTHER; note = 2'-O-methyl ribonucleotide
  modified_base 52..57: mod_base = OTHER; note = 2'-O-methyl ribonucleotide
  modified_base 60..61: mod_base = OTHER; note = 2'-O-methyl ribonucleotide
  modified_base 66..67: mod_base = OTHER; note = 2'-O-methyl ribonucleotide
  modified_base 70..72: mod_base = OTHER; note = 2'-O-methyl ribonucleotide
  modified_base 74..81: mod_base = OTHER; note = 2'-O-methyl ribonucleotide
  modified_base 83..100: mod_base = OTHER; note = 2'-O-methyl ribonucleotide
  modified_base 1..4: mod_base = OTHER; note = phosphorothioate linkage
  modified_base 97..100: mod_base = OTHER; note = phosphorothioate linkage
  misc_feature 1..2: note = RNA
  misc_feature 3..12: note = DNA
  misc_feature 13: note = RNA
  misc_feature 14: note = DNA
  misc_feature 15: note = RNA
  misc_feature 16: note = DNA
  misc_feature 17: note = RNA
  misc_feature 18: note = DNA
  misc_feature 19: note = RNA
  misc_feature 20: note = DNA
  misc_feature 21..100: note = RNA

SEQ ID NO: 521 - DNA, 100 bp, synthetic construct; identical to SEQ ID NO: 73
  source 1..100: mol_type = other DNA
  modified_base 1..2: mod_base = OTHER; note = 2'-O-methyl ribonucleotide
  modified_base 21: mod_base = OTHER; note = 2'-O-methyl ribonucleotide
  modified_base 28..32: mod_base = OTHER; note = 2'-O-methyl ribonucleotide
  modified_base 34..42: mod_base = OTHER; note = 2'-O-methyl ribonucleotide
  modified_base 46: mod_base = OTHER; note = 2'-O-methyl ribonucleotide
  modified_base 48: mod_base = OTHER; note = 2'-O-methyl ribonucleotide
  modified_base 50: mod_base = OTHER; note = 2'-O-methyl ribonucleotide
  modified_base 52..57: mod_base = OTHER; note = 2'-O-methyl ribonucleotide
  modified_base 60..61: mod_base = OTHER; note = 2'-O-methyl ribonucleotide
  modified_base 66..67: mod_base = OTHER; note = 2'-O-methyl ribonucleotide
  modified_base 70..72: mod_base = OTHER; note = 2'-O-methyl ribonucleotide
  modified_base 74..81: mod_base = OTHER; note = 2'-O-methyl ribonucleotide
  modified_base 83..100: mod_base = OTHER; note = 2'-O-methyl ribonucleotide
  modified_base 1..4: mod_base = OTHER; note = phosphorothioate linkage
  modified_base 97..100: mod_base = OTHER; note = phosphorothioate linkage
  misc_feature 1..2: note = RNA
  misc_feature 3..14: note = DNA
  misc_feature 15: note = RNA
  misc_feature 16: note = DNA
  misc_feature 17: note = RNA
  misc_feature 18: note = DNA
  misc_feature 19: note = RNA
  misc_feature 20: note = DNA
  misc_feature 21..100: note = RNA

SEQ ID NO: 522 - DNA, 100 bp, synthetic construct; identical to SEQ ID NO: 73
  source 1..100: mol_type = other DNA
  modified_base 1..2: mod_base = OTHER; note = 2'-O-methyl ribonucleotide
  modified_base 21: mod_base = OTHER; note = 2'-O-methyl ribonucleotide
  modified_base 28..32: mod_base = OTHER; note = 2'-O-methyl ribonucleotide
  modified_base 34..42: mod_base = OTHER; note = 2'-O-methyl ribonucleotide
  modified_base 46: mod_base = OTHER; note = 2'-O-methyl ribonucleotide
  modified_base 48: mod_base = OTHER; note = 2'-O-methyl ribonucleotide
  modified_base 50: mod_base = OTHER; note = 2'-O-methyl ribonucleotide
  modified_base 52..57: mod_base = OTHER; note = 2'-O-methyl ribonucleotide
  modified_base 60..61: mod_base = OTHER; note = 2'-O-methyl ribonucleotide
  modified_base 66..67: mod_base = OTHER; note = 2'-O-methyl ribonucleotide
  modified_base 70..72: mod_base = OTHER; note = 2'-O-methyl ribonucleotide
  modified_base 74..81: mod_base = OTHER; note = 2'-O-methyl ribonucleotide
  modified_base 83..100: mod_base = OTHER; note = 2'-O-methyl ribonucleotide
  modified_base 1..4: mod_base = OTHER; note = phosphorothioate linkage
  modified_base 97..100: mod_base = OTHER; note = phosphorothioate linkage
  misc_feature 1..2: note = RNA
  misc_feature 3..16: note = DNA
  misc_feature 17: note = RNA
  misc_feature 18: note = DNA
  misc_feature 19: note = RNA
  misc_feature 20: note = DNA
  misc_feature 21..100: note = RNA

SEQ ID NO: 523 - DNA, 100 bp, synthetic construct; identical to SEQ ID NO: 73
  source 1..100: mol_type = other DNA
  modified_base 1..2: mod_base = OTHER; note = 2'-O-methyl ribonucleotide
  modified_base 21: mod_base = OTHER; note = 2'-O-methyl ribonucleotide
  modified_base 28..32: mod_base = OTHER; note = 2'-O-methyl ribonucleotide
  modified_base 34..42: mod_base = OTHER; note = 2'-O-methyl ribonucleotide
  modified_base 46: mod_base = OTHER; note = 2'-O-methyl ribonucleotide
  modified_base 48: mod_base = OTHER; note = 2'-O-methyl ribonucleotide
  modified_base 50: mod_base = OTHER; note = 2'-O-methyl ribonucleotide
  modified_base 52..57: mod_base = OTHER; note = 2'-O-methyl ribonucleotide
  modified_base 60..61: mod_base = OTHER; note = 2'-O-methyl ribonucleotide
  modified_base 66..67: mod_base = OTHER; note = 2'-O-methyl ribonucleotide
  modified_base 70..72: mod_base = OTHER; note = 2'-O-methyl ribonucleotide
  modified_base 74..81: mod_base = OTHER; note = 2'-O-methyl ribonucleotide
  modified_base 83..100: mod_base = OTHER; note = 2'-O-methyl ribonucleotide
  modified_base 1..4: mod_base = OTHER; note = phosphorothioate linkage
  modified_base 97..100: mod_base = OTHER; note = phosphorothioate linkage
  misc_feature 1..2: note = RNA
  misc_feature 3..18: note = DNA
  misc_feature 19: note = RNA
  misc_feature 20: note = DNA
  misc_feature 21..100: note = RNA

SEQ ID NO: 524 - DNA, 100 bp, synthetic construct; identical to SEQ ID NO: 73
  source 1..100: mol_type = other DNA
  modified_base 1..2: mod_base = OTHER; note = 2'-O-methyl ribonucleotide
  modified_base 21: mod_base = OTHER; note = 2'-O-methyl ribonucleotide
  modified_base 28..32: mod_base = OTHER; note = 2'-O-methyl ribonucleotide
  modified_base 34..42: mod_base = OTHER; note = 2'-O-methyl ribonucleotide
  modified_base 46: mod_base = OTHER; note = 2'-O-methyl ribonucleotide
  modified_base 48: mod_base = OTHER; note = 2'-O-methyl ribonucleotide
  modified_base 50: mod_base = OTHER; note = 2'-O-methyl ribonucleotide
  modified_base 52..57: mod_base = OTHER; note = 2'-O-methyl ribonucleotide
  modified_base 60..61: mod_base = OTHER; note = 2'-O-methyl ribonucleotide
  modified_base 66..67: mod_base = OTHER; note = 2'-O-methyl ribonucleotide
  modified_base 70..72: mod_base = OTHER; note = 2'-O-methyl ribonucleotide
  modified_base 74..81: mod_base = OTHER; note = 2'-O-methyl ribonucleotide
  modified_base 83..100: mod_base = OTHER; note = 2'-O-methyl ribonucleotide
  modified_base 1..4: mod_base = OTHER; note = phosphorothioate linkage
  modified_base 97..100: mod_base = OTHER; note = phosphorothioate linkage
  misc_feature 1..2: note = RNA
  misc_feature 3..20: note = DNA
  misc_feature 21..100: note = RNA

SEQ ID NO: 525 - DNA, 100 bp, synthetic construct; identical to SEQ ID NO: 73
  source 1..100: mol_type = other DNA
  modified_base 1: mod_base = OTHER; note = 2'-O-methyl ribonucleotide
  modified_base 21: mod_base = OTHER; note = 2'-O-methyl ribonucleotide
  modified_base 28..32: mod_base = OTHER; note = 2'-O-methyl ribonucleotide
  modified_base 34..42: mod_base = OTHER; note = 2'-O-methyl ribonucleotide
  modified_base 46: mod_base = OTHER; note = 2'-O-methyl ribonucleotide
  modified_base 48: mod_base = OTHER; note = 2'-O-methyl ribonucleotide
  modified_base 50: mod_base = OTHER; note = 2'-O-methyl ribonucleotide
  modified_base 52..57: mod_base = OTHER; note = 2'-O-methyl ribonucleotide
  modified_base 60..61: mod_base = OTHER; note = 2'-O-methyl ribonucleotide
  modified_base 66..67: mod_base = OTHER; note = 2'-O-methyl ribonucleotide
  modified_base 70..72: mod_base = OTHER; note = 2'-O-methyl ribonucleotide
  modified_base 74..81: mod_base = OTHER; note = 2'-O-methyl ribonucleotide
  modified_base 83..100: mod_base = OTHER; note = 2'-O-methyl ribonucleotide
  modified_base 1..4: mod_base = OTHER; note = phosphorothioate linkage
  modified_base 97..100: mod_base = OTHER; note = phosphorothioate linkage
  misc_feature 1: note = RNA
  misc_feature 2..20: note = DNA
  misc_feature 21..100: note = RNA

SEQ ID NO: 526 - DNA, 100 bp, synthetic construct; identical to SEQ ID NO: 73
  source 1..100: mol_type = other DNA
  modified_base 1..3: mod_base = OTHER; note = 2'-O-methyl ribonucleotide
  modified_base 21: mod_base = OTHER; note = 2'-O-methyl ribonucleotide
  modified_base 28..32: mod_base = OTHER; note = 2'-O-methyl ribonucleotide
  modified_base 34..42: mod_base = OTHER; note = 2'-O-methyl ribonucleotide
  modified_base 46: mod_base = OTHER; note = 2'-O-methyl ribonucleotide
  modified_base 48: mod_base = OTHER; note = 2'-O-methyl ribonucleotide
  modified_base 50: mod_base = OTHER; note = 2'-O-methyl ribonucleotide
  modified_base 52..57: mod_base = OTHER; note = 2'-O-methyl ribonucleotide
  modified_base 60..61: mod_base = OTHER; note = 2'-O-methyl ribonucleotide
  modified_base 66..67: mod_base = OTHER; note = 2'-O-methyl ribonucleotide
  modified_base 70..72: mod_base = OTHER; note = 2'-O-methyl ribonucleotide
  modified_base 74..81: mod_base = OTHER; note = 2'-O-methyl ribonucleotide
  modified_base 83..100: mod_base = OTHER; note = 2'-O-methyl ribonucleotide
  modified_base 1..4: mod_base = OTHER; note = phosphorothioate linkage
  modified_base 97..100: mod_base = OTHER; note = phosphorothioate linkage
  misc_feature 1..3: note = RNA
  misc_feature 4..5: note = DNA
  misc_feature 6: note = RNA
  misc_feature 7: note = DNA
  misc_feature 8: note = RNA
  misc_feature 9: note = DNA
  misc_feature 10: note = RNA
  misc_feature 11: note = DNA
  misc_feature 12: note = RNA
  misc_feature 13: note = DNA
  misc_feature 14: note = RNA
  misc_feature 15: note = DNA
  misc_feature 16: note = RNA
  misc_feature 17: note = DNA
  misc_feature 18: note = RNA
  misc_feature 19: note = DNA
  misc_feature 20: note = RNA
  misc_feature 21..100: note = DNA

SEQ ID NO: 527 - DNA, 100 bp, synthetic construct; identical to SEQ ID NO: 73
  source 1..100: mol_type = other DNA
  modified_base 1..2: mod_base = OTHER; note = 2'-O-methyl ribonucleotide
  modified_base 21: mod_base = OTHER; note = 2'-O-methyl ribonucleotide
  modified_base 28..32: mod_base = OTHER; note = 2'-O-methyl ribonucleotide
  modified_base 34..42: mod_base = OTHER; note = 2'-O-methyl ribonucleotide
  modified_base 46: mod_base = OTHER; note = 2'-O-methyl ribonucleotide
  modified_base 48: mod_base = OTHER; note = 2'-O-methyl ribonucleotide
  modified_base 50: mod_base = OTHER; note = 2'-O-methyl ribonucleotide
  modified_base 52..57: mod_base = OTHER; note = 2'-O-methyl ribonucleotide
  modified_base 60..61: mod_base = OTHER; note = 2'-O-methyl ribonucleotide
  modified_base 66..67: mod_base = OTHER; note = 2'-O-methyl ribonucleotide
  modified_base 70..72: mod_base = OTHER; note = 2'-O-methyl ribonucleotide
  modified_base 74..81: mod_base = OTHER; note = 2'-O-methyl ribonucleotide
  modified_base 83..100: mod_base = OTHER; note = 2'-O-methyl ribonucleotide
  modified_base 1..4: mod_base = OTHER; note = phosphorothioate linkage
  modified_base 97..100: mod_base = OTHER; note = phosphorothioate linkage
  misc_feature 1..2: note = RNA
  misc_feature 3: note = DNA
  misc_feature 4: note = RNA
  misc_feature 5: note = DNA
  misc_feature 6: note = RNA
  misc_feature 7: note = DNA
  misc_feature 8: note = RNA
  misc_feature 9: note = DNA
  misc_feature 10: note = RNA
  misc_feature 11: note = DNA
  misc_feature 12: note = RNA
  misc_feature 13: note = DNA
  misc_feature 14: note = RNA
  misc_feature 15: note = DNA
  misc_feature 16: note = RNA
  misc_feature 17: note = DNA
  misc_feature 18: note = RNA
  misc_feature 19: note = DNA
  misc_feature 20..100: note = RNA

SEQ ID NO: 528 - DNA, 100 bp, synthetic construct; identical to SEQ ID NO: 73
  source 1..100: mol_type = other DNA
  modified_base 1..2: mod_base = OTHER; note = 2'-O-methyl ribonucleotide
  modified_base 21: mod_base = OTHER; note = 2'-O-methyl ribonucleotide
  modified_base 28..32: mod_base = OTHER; note = 2'-O-methyl ribonucleotide
  modified_base 34..42: mod_base = OTHER; note = 2'-O-methyl ribonucleotide
  modified_base 46: mod_base = OTHER; note = 2'-O-methyl ribonucleotide
  modified_base 48: mod_base = OTHER; note = 2'-O-methyl ribonucleotide
  modified_base 50: mod_base = OTHER; note = 2'-O-methyl ribonucleotide
  modified_base 52..57: mod_base = OTHER; note = 2'-O-methyl ribonucleotide
  modified_base 60..61: mod_base = OTHER; note = 2'-O-methyl ribonucleotide
  modified_base 66..67: mod_base = OTHER; note = 2'-O-methyl ribonucleotide
  modified_base 70..72: mod_base = OTHER; note = 2'-O-methyl ribonucleotide
  modified_base 74..81: mod_base = OTHER; note = 2'-O-methyl ribonucleotide
  modified_base 83..100: mod_base = OTHER; note = 2'-O-methyl ribonucleotide
  modified_base 1..4: mod_base = OTHER; note = phosphorothioate linkage
  modified_base 97..100: mod_base = OTHER; note = phosphorothioate linkage
  misc_feature 1..2: note = RNA
  misc_feature 3..5: note = DNA
  misc_feature 6: note = RNA
  misc_feature 7: note = DNA
  misc_feature 8: note = RNA
  misc_feature 9: note = DNA
  misc_feature 10: note = RNA
  misc_feature 11: note = DNA
  misc_feature 12: note = RNA
  misc_feature 13: note = DNA
  misc_feature 14: note = RNA
  misc_feature 15: note = DNA
  misc_feature 16: note = RNA
  misc_feature 17: note = DNA
  misc_feature 18: note = RNA
  misc_feature 19: note = DNA
  misc_feature 20..100: note = RNA

SEQ ID NO: 529 - DNA, 100 bp, synthetic construct; identical to SEQ ID NO: 73
  source 1..100: mol_type = other DNA
  modified_base 1..2: mod_base = OTHER; note = 2'-O-methyl ribonucleotide
  modified_base 21: mod_base = OTHER; note = 2'-O-methyl ribonucleotide
  modified_base 28..32: mod_base = OTHER; note = 2'-O-methyl ribonucleotide
  modified_base 34..42: mod_base = OTHER; note = 2'-O-methyl ribonucleotide
  modified_base 46: mod_base = OTHER; note = 2'-O-methyl ribonucleotide
  modified_base 48: mod_base = OTHER; note = 2'-O-methyl ribonucleotide
  modified_base 50: mod_base = OTHER; note = 2'-O-methyl ribonucleotide
  modified_base 52..57: mod_base = OTHER; note = 2'-O-methyl ribonucleotide
  modified_base 60..61: mod_base = OTHER; note = 2'-O-methyl ribonucleotide
  modified_base 66..67: mod_base = OTHER; note = 2'-O-methyl ribonucleotide
  modified_base 70..72: mod_base = OTHER; note = 2'-O-methyl ribonucleotide
  modified_base 74..81: mod_base = OTHER; note = 2'-O-methyl ribonucleotide
  modified_base 83..100: mod_base = OTHER; note = 2'-O-methyl ribonucleotide
  modified_base 1..4: mod_base = OTHER; note = phosphorothioate linkage
  modified_base 97..100: mod_base = OTHER; note = phosphorothioate linkage
  misc_feature 1..2: note = RNA
  misc_feature 3..9: note = DNA
  misc_feature 10: note = RNA
  misc_feature 11: note = DNA
  misc_feature 12: note = RNA
  misc_feature 13: note = DNA
  misc_feature 14: note = RNA
  misc_feature 15: note = DNA
  misc_feature 16: note = RNA
  misc_feature 17: note = DNA
  misc_feature 18: note = RNA
  misc_feature 19: note = DNA
  misc_feature 20..100: note = RNA

SEQ ID NO: 530 - DNA, 100 bp, synthetic construct; identical to SEQ ID NO: 73
  source 1..100: mol_type = other DNA
  modified_base 1..2: mod_base = OTHER; note = 2'-O-methyl ribonucleotide
  modified_base 21: mod_base = OTHER; note = 2'-O-methyl ribonucleotide
  modified_base 28..32: mod_base = OTHER; note = 2'-O-methyl ribonucleotide
  modified_base 34..42: mod_base = OTHER; note = 2'-O-methyl ribonucleotide
  modified_base 46: mod_base = OTHER; note = 2'-O-methyl ribonucleotide
  modified_base 48: mod_base = OTHER; note = 2'-O-methyl ribonucleotide
  modified_base 50: mod_base = OTHER; note = 2'-O-methyl ribonucleotide
  modified_base 52..57: mod_base = OTHER; note = 2'-O-methyl ribonucleotide
  modified_base 60..61: mod_base = OTHER; note = 2'-O-methyl ribonucleotide
  modified_base 66..67: mod_base = OTHER; note = 2'-O-methyl ribonucleotide
  modified_base 70..72: mod_base = OTHER; note = 2'-O-methyl ribonucleotide
  modified_base 74..81: mod_base = OTHER; note = 2'-O-methyl ribonucleotide
  modified_base 83..100: mod_base = OTHER; note = 2'-O-methyl ribonucleotide
  modified_base 1..4: mod_base = OTHER; note = phosphorothioate linkage
  modified_base 97..100: mod_base = OTHER; note = phosphorothioate linkage
  misc_feature 1..2: note = RNA
  misc_feature 3..11: note = DNA
  misc_feature 12: note = RNA
  misc_feature 13: note = DNA
  misc_feature 14: note = RNA
  misc_feature 15: note = DNA
  misc_feature 16: note = RNA
  misc_feature 17: note = DNA
  misc_feature 18: note = RNA
  misc_feature 19: note = DNA
  misc_feature 20..100: note = RNA

SEQ ID NO: 531 - DNA, 100 bp, synthetic construct; identical to SEQ ID NO: 73
  source 1..100: mol_type = other DNA
  modified_base 1..2: mod_base = OTHER; note = 2'-O-methyl ribonucleotide
  modified_base 21: mod_base = OTHER; note = 2'-O-methyl ribonucleotide
  modified_base 28..32: mod_base = OTHER; note = 2'-O-methyl ribonucleotide
  modified_base 34..42: mod_base = OTHER; note = 2'-O-methyl ribonucleotide
  modified_base 46: mod_base = OTHER; note = 2'-O-methyl ribonucleotide
  modified_base 48: mod_base = OTHER; note = 2'-O-methyl ribonucleotide
  modified_base 50: mod_base = OTHER; note = 2'-O-methyl ribonucleotide
  modified_base 52..57: mod_base = OTHER; note = 2'-O-methyl ribonucleotide
  modified_base 60..61: mod_base = OTHER; note = 2'-O-methyl ribonucleotide
  modified_base 66..67: mod_base = OTHER; note = 2'-O-methyl ribonucleotide
  modified_base 70..72: mod_base = OTHER; note = 2'-O-methyl ribonucleotide
  modified_base 74..81: mod_base = OTHER; note = 2'-O-methyl ribonucleotide
  modified_base 83..100: mod_base = OTHER; note = 2'-O-methyl ribonucleotide
  modified_base 1..4: mod_base = OTHER; note = phosphorothioate linkage
  modified_base 97..100: mod_base = OTHER; note = phosphorothioate linkage
  misc_feature 1..2: note = RNA
  misc_feature 3..13: note = DNA
  misc_feature 14: note = RNA
  misc_feature 15: note = DNA
  misc_feature 16: note = RNA
  misc_feature 17: note = DNA
  misc_feature 18: note = RNA
  misc_feature 19: note = DNA
  misc_feature 20..100: note = RNA

SEQ ID NO: 532 - DNA, 100 bp, synthetic construct; identical to SEQ ID NO: 73
  source 1..100: mol_type = other DNA
  modified_base 1..2: mod_base = OTHER; note = 2'-O-methyl ribonucleotide
  modified_base 21: mod_base = OTHER; note = 2'-O-methyl ribonucleotide
  modified_base 28..32: mod_base = OTHER; note = 2'-O-methyl ribonucleotide
  modified_base 34..42: mod_base = OTHER; note = 2'-O-methyl ribonucleotide
  modified_base 46: mod_base = OTHER; note = 2'-O-methyl ribonucleotide
  modified_base 48: mod_base = OTHER; note = 2'-O-methyl ribonucleotide
  modified_base 50: mod_base = OTHER; note = 2'-O-methyl ribonucleotide
  modified_base 52..57: mod_base = OTHER; note = 2'-O-methyl ribonucleotide
  modified_base 60..61: mod_base = OTHER; note = 2'-O-methyl ribonucleotide
  modified_base 66..67: mod_base = OTHER; note = 2'-O-methyl ribonucleotide
  modified_base 70..72: mod_base = OTHER; note = 2'-O-methyl ribonucleotide
  modified_base 74..81: mod_base = OTHER; note = 2'-O-methyl ribonucleotide
  modified_base 83..100: mod_base = OTHER; note = 2'-O-methyl ribonucleotide
  modified_base 1..4: mod_base = OTHER; note = phosphorothioate linkage
  modified_base 97..100: mod_base = OTHER; note = phosphorothioate linkage
  misc_feature 1..2: note = RNA
  misc_feature 3..15: note = DNA
  misc_feature 16: note = RNA
  misc_feature 17: note = DNA
  misc_feature 18: note = RNA
  misc_feature 19: note = DNA
  misc_feature 20..100: note = RNA

SEQ ID NO: 533 - DNA, 100 bp, synthetic construct; identical to SEQ ID NO: 73
  source 1..100: mol_type = other DNA
  modified_base 1..2: mod_base = OTHER; note = 2'-O-methyl ribonucleotide
  modified_base 21: mod_base = OTHER; note = 2'-O-methyl ribonucleotide
  modified_base 28..32: mod_base = OTHER; note = 2'-O-methyl ribonucleotide
  modified_base 34..42: mod_base = OTHER; note = 2'-O-methyl ribonucleotide
  modified_base 46: mod_base = OTHER; note = 2'-O-methyl ribonucleotide
  modified_base 48: mod_base = OTHER; note = 2'-O-methyl ribonucleotide
  modified_base 50: mod_base = OTHER; note = 2'-O-methyl ribonucleotide
  modified_base 52..57: mod_base = OTHER; note = 2'-O-methyl ribonucleotide
  modified_base 60..61: mod_base = OTHER; note = 2'-O-methyl ribonucleotide
  modified_base 66..67: mod_base = OTHER; note = 2'-O-methyl ribonucleotide
  modified_base 70..72: mod_base = OTHER; note = 2'-O-methyl ribonucleotide
  modified_base 74..81: mod_base = OTHER; note = 2'-O-methyl ribonucleotide
  modified_base 83..100: mod_base = OTHER; note = 2'-O-methyl ribonucleotide
  modified_base 1..4: mod_base = OTHER; note = phosphorothioate linkage
  modified_base 97..100: mod_base = OTHER; note = phosphorothioate linkage
  misc_feature 1..2: note = RNA
  misc_feature 3..17: note = DNA
  misc_feature 18: note = RNA
  misc_feature 19: note = DNA
  misc_feature 20: note = RNA
  misc_feature 21..100: note = DNA

SEQ ID NO: 534 - DNA, 100 bp, synthetic construct; identical to SEQ ID NO: 73
  source 1..100: mol_type = other DNA
  modified_base 1..2: mod_base = OTHER; note = 2'-O-methyl ribonucleotide
  modified_base 21: mod_base = OTHER; note = 2'-O-methyl ribonucleotide
  modified_base 28..32: mod_base = OTHER; note = 2'-O-methyl ribonucleotide
  modified_base 34..42: mod_base = OTHER; note = 2'-O-methyl ribonucleotide
  modified_base 46: mod_base = OTHER; note = 2'-O-methyl ribonucleotide
  modified_base 48: mod_base = OTHER; note = 2'-O-methyl ribonucleotide
  modified_base 50: mod_base = OTHER; note = 2'-O-methyl ribonucleotide
  modified_base 52..57: mod_base = OTHER; note = 2'-O-methyl ribonucleotide
  modified_base 60..61: mod_base = OTHER; note = 2'-O-methyl ribonucleotide
  modified_base 66..67: mod_base = OTHER; note = 2'-O-methyl ribonucleotide
  modified_base 70..72: mod_base = OTHER; note = 2'-O-methyl ribonucleotide
  modified_base 74..81: mod_base = OTHER; note = 2'-O-methyl ribonucleotide
  modified_base 83..100: mod_base = OTHER; note = 2'-O-methyl ribonucleotide
  modified_base 1..4: mod_base = OTHER; note = phosphorothioate linkage
  modified_base 97..100: mod_base = OTHER; note = phosphorothioate linkage
  misc_feature 1..2: note = RNA
  misc_feature 3..19: note = DNA
  misc_feature 20..100: note = RNA

SEQ ID NO: 535 - DNA, 100 bp, synthetic construct; identical to SEQ ID NO: 73
  source 1..100: mol_type = other DNA
  modified_base 1..3: mod_base = OTHER; note = 2'-O-methyl ribonucleotide
  modified_base 21: mod_base = OTHER; note = 2'-O-methyl ribonucleotide
  modified_base 28..32: mod_base = OTHER; note = 2'-O-methyl ribonucleotide
  modified_base 34..42: mod_base = OTHER; note = 2'-O-methyl ribonucleotide
  modified_base 46: mod_base = OTHER; note = 2'-O-methyl ribonucleotide
  modified_base 48: mod_base = OTHER; note = 2'-O-methyl ribonucleotide
  modified_base 50: mod_base = OTHER; note = 2'-O-methyl ribonucleotide
  modified_base 52..57: mod_base = OTHER; note = 2'-O-methyl ribonucleotide
  modified_base 60..61: mod_base = OTHER; note = 2'-O-methyl ribonucleotide
  modified_base 66..67: mod_base = OTHER; note = 2'-O-methyl ribonucleotide
  modified_base 70..72: mod_base = OTHER; note = 2'-O-methyl ribonucleotide
  modified_base 74..81: mod_base = OTHER; note = 2'-O-methyl ribonucleotide
  modified_base 83..100: mod_base = OTHER; note = 2'-O-methyl ribonucleotide
  modified_base 1..4: mod_base = OTHER; note = phosphorothioate linkage
  modified_base 97..100: mod_base = OTHER; note = phosphorothioate linkage
  misc_feature 1..3: note = RNA
  misc_feature 4..8: note = DNA
  misc_feature 9: note = RNA
  misc_feature 10: note = DNA
  misc_feature 11: note = RNA
  misc_feature 12: note = DNA
  misc_feature 13: note = RNA
  misc_feature 14: note = DNA
  misc_feature 15: note = RNA
  misc_feature 16: note = DNA
  misc_feature 17: note = RNA
  misc_feature 18: note = DNA
  misc_feature 19: note = RNA
  misc_feature 20: note = DNA
  misc_feature 21..100: note = RNA

SEQ ID NO: 536 - DNA, 100 bp, synthetic construct; identical to SEQ ID NO: 73
  source 1..100: mol_type = other DNA
  modified_base 1..3: mod_base = OTHER; note = 2'-O-methyl ribonucleotide
  modified_base 21: mod_base = OTHER; note = 2'-O-methyl ribonucleotide
  modified_base 28..32: mod_base = OTHER; note = 2'-O-methyl ribonucleotide
  modified_base 34..42: mod_base = OTHER; note = 2'-O-methyl ribonucleotide
  modified_base 46: mod_base = OTHER; note = 2'-O-methyl ribonucleotide
  modified_base 48: mod_base = OTHER; note = 2'-O-methyl ribonucleotide
  modified_base 50: mod_base = OTHER; note = 2'-O-methyl ribonucleotide
  modified_base 52..57: mod_base = OTHER; note = 2'-O-methyl ribonucleotide
  modified_base 60..61: mod_base = OTHER; note = 2'-O-methyl ribonucleotide
  modified_base 66..67: mod_base = OTHER; note = 2'-O-methyl ribonucleotide
  modified_base 70..72: mod_base = OTHER; note = 2'-O-methyl ribonucleotide
  modified_base 74..81: mod_base = OTHER; note = 2'-O-methyl ribonucleotide
  modified_base 83..100: mod_base = OTHER; note = 2'-O-methyl ribonucleotide
  modified_base 1..4: mod_base = OTHER; note = phosphorothioate linkage
  modified_base 97..100: mod_base = OTHER; note = phosphorothioate linkage
  misc_feature 1..3: note = RNA
  misc_feature 4..10: note = DNA
  misc_feature 11: note = RNA
  misc_feature 12: note = DNA
  misc_feature 13: note = RNA
  misc_feature 14: note = DNA
  misc_feature 15: note = RNA
  misc_feature 16: note = DNA
  misc_feature 17: note = RNA
  misc_feature 18: note = DNA
  misc_feature 19: note = RNA
  misc_feature 20: note = DNA
  misc_feature 21: note = RNA

SEQ ID NO: 537 - DNA, 100 bp, synthetic construct; identical to SEQ ID NO: 73
  source 1..100: mol_type = other DNA
  modified_base 1..3: mod_base = OTHER; note = 2'-O-methyl ribonucleotide
  modified_base 21: mod_base = OTHER; note = 2'-O-methyl ribonucleotide
  modified_base 28..32: mod_base = OTHER; note = 2'-O-methyl ribonucleotide
  modified_base 34..42: mod_base = OTHER; note = 2'-O-methyl ribonucleotide
  modified_base 46: mod_base = OTHER; note = 2'-O-methyl ribonucleotide
  modified_base 48: mod_base = OTHER; note = 2'-O-methyl ribonucleotide
  modified_base 50: mod_base = OTHER; note = 2'-O-methyl ribonucleotide
  modified_base 52..57: mod_base = OTHER; note = 2'-O-methyl ribonucleotide
  modified_base 60..61: mod_base = OTHER; note = 2'-O-methyl ribonucleotide
  modified_base 66..67: mod_base = OTHER; note = 2'-O-methyl ribonucleotide
  modified_base 70..72: mod_base = OTHER; note = 2'-O-methyl ribonucleotide
  modified_base 74..81: mod_base = OTHER; note = 2'-O-methyl ribonucleotide
  modified_base 83..100: mod_base = OTHER; note = 2'-O-methyl ribonucleotide
  modified_base 1..4: mod_base = OTHER; note = phosphorothioate linkage
  modified_base 97..100: mod_base = OTHER; note = phosphorothioate linkage
  misc_feature 1..3: note = RNA
  misc_feature 4..12: note = DNA
  misc_feature 13: note = RNA
  misc_feature 14: note = DNA
  misc_feature 15: note = RNA
  misc_feature 16: note = DNA
  misc_feature 17: note = RNA
  misc_feature 18: note = DNA
  misc_feature 19: note = RNA
  misc_feature 20: note = DNA
  misc_feature 21..100: note = RNA

SEQ ID NO: 538 - DNA, 100 bp, synthetic construct; identical to SEQ ID NO: 73
  source 1..100: mol_type = other DNA
  modified_base 1..3: mod_base = OTHER; note = 2'-O-methyl ribonucleotide
  modified_base 21: mod_base = OTHER; note = 2'-O-methyl ribonucleotide
  modified_base 28..32: mod_base = OTHER; note = 2'-O-methyl ribonucleotide
  modified_base 34..42: mod_base = OTHER; note = 2'-O-methyl ribonucleotide
  modified_base 46: mod_base = OTHER; note = 2'-O-methyl ribonucleotide
  modified_base 48: mod_base = OTHER; note = 2'-O-methyl ribonucleotide
  modified_base 50: mod_base = OTHER; note = 2'-O-methyl ribonucleotide
  modified_base 52..57: mod_base = OTHER; note = 2'-O-methyl ribonucleotide
  modified_base 60..61: mod_base = OTHER; note = 2'-O-methyl ribonucleotide
  modified_base 66..67: mod_base = OTHER; note = 2'-O-methyl ribonucleotide
  modified_base 70..72: mod_base = OTHER; note = 2'-O-methyl ribonucleotide
  modified_base 74..81: mod_base = OTHER; note = 2'-O-methyl ribonucleotide
  modified_base 83..100: mod_base = OTHER; note = 2'-O-methyl ribonucleotide
  modified_base 1..4: mod_base = OTHER; note = phosphorothioate linkage
  modified_base 97..100: mod_base = OTHER; note = phosphorothioate linkage
  misc_feature 1..3: note = RNA
  misc_feature 4..14: note = DNA
  misc_feature 15: note = RNA
  misc_feature 16: note = DNA
  misc_feature 17: note = RNA
  misc_feature 18: note = DNA
  misc_feature 19: note = RNA
  misc_feature 20: note = DNA
  misc_feature 21..100: note = RNA

SEQ ID NO: 539 - DNA, 100 bp, synthetic construct; identical to SEQ ID NO: 73
  source 1..100: mol_type = other DNA
  modified_base 1..3: mod_base = OTHER; note = 2'-O-methyl ribonucleotide
  modified_base 21: mod_base = OTHER; note = 2'-O-methyl ribonucleotide
  modified_base 28..32: mod_base = OTHER; note = 2'-O-methyl ribonucleotide
  modified_base 34..42: mod_base = OTHER; note = 2'-O-methyl ribonucleotide
  modified_base 46: mod_base = OTHER; note = 2'-O-methyl ribonucleotide
  modified_base 48: mod_base = OTHER; note = 2'-O-methyl ribonucleotide
  modified_base 50: mod_base = OTHER; note = 2'-O-methyl ribonucleotide
  modified_base 52..57: mod_base = OTHER; note = 2'-O-methyl ribonucleotide
  modified_base 60..61: mod_base = OTHER; note = 2'-O-methyl ribonucleotide
  modified_base 66..67: mod_base = OTHER; note = 2'-O-methyl ribonucleotide
  modified_base 70..72: mod_base = OTHER; note = 2'-O-methyl ribonucleotide
  modified_base 74..81: mod_base = OTHER; note = 2'-O-methyl ribonucleotide
  modified_base 83..100: mod_base = OTHER; note = 2'-O-methyl ribonucleotide
  modified_base 1..4: mod_base = OTHER; note = phosphorothioate linkage
  modified_base 97..100: mod_base = OTHER; note = phosphorothioate linkage
  misc_feature 1..3: note = RNA
  misc_feature 4..16: note = DNA
  misc_feature 17: note = RNA
  misc_feature 18: note = DNA
  misc_feature 19: note = RNA
  misc_feature 20: note = DNA
  misc_feature 21..100: note = RNA

SEQ ID NO: 540 - DNA, 100 bp, synthetic construct; identical to SEQ ID NO: 73
  source 1..100: mol_type = other DNA
  modified_base 1..3: mod_base = OTHER; note = 2'-O-methyl ribonucleotide
  modified_base 21: mod_base = OTHER; note = 2'-O-methyl ribonucleotide
  modified_base 28..32: mod_base = OTHER; note = 2'-O-methyl ribonucleotide
  modified_base 34..42: mod_base = OTHER; note = 2'-O-methyl ribonucleotide
  modified_base 46: mod_base = OTHER; note = 2'-O-methyl ribonucleotide
  modified_base 48: mod_base = OTHER; note = 2'-O-methyl ribonucleotide
  modified_base 50: mod_base = OTHER; note = 2'-O-methyl ribonucleotide
  modified_base 52..57: mod_base = OTHER; note = 2'-O-methyl ribonucleotide
  modified_base 60..61: mod_base = OTHER; note = 2'-O-methyl ribonucleotide
  modified_base 66..67: mod_base = OTHER; note = 2'-O-methyl ribonucleotide
  modified_base 70..72: mod_base = OTHER; note = 2'-O-methyl ribonucleotide
  modified_base 74..81: mod_base = OTHER; note = 2'-O-methyl ribonucleotide
  modified_base 83..100: mod_base = OTHER; note = 2'-O-methyl ribonucleotide
  modified_base 1..4: mod_base = OTHER; note = phosphorothioate linkage
  modified_base 97..100: mod_base = OTHER; note = phosphorothioate linkage
  misc_feature 1..3: note = RNA
  misc_feature 4..18: note = DNA
  misc_feature 19: note = RNA
  misc_feature 20: note = DNA
  misc_feature 21..100: note = RNA

SEQ ID NO: 541 - DNA, 100 bp, synthetic construct; identical to SEQ ID NO: 73
  source 1..100: mol_type = other DNA
  modified_base 1..3: mod_base = OTHER; note = 2'-O-methyl ribonucleotide
  modified_base 21: mod_base = OTHER; note = 2'-O-methyl ribonucleotide
  modified_base 28..32: mod_base = OTHER; note = 2'-O-methyl ribonucleotide
  modified_base 34..42: mod_base = OTHER; note = 2'-O-methyl ribonucleotide
  modified_base 46: mod_base = OTHER; note = 2'-O-methyl ribonucleotide
  modified_base 48: mod_base = OTHER; note = 2'-O-methyl ribonucleotide
  modified_base 50: mod_base = OTHER; note = 2'-O-methyl ribonucleotide
  modified_base 52..57: mod_base = OTHER; note = 2'-O-methyl ribonucleotide
  modified_base 60..61: mod_base = OTHER; note = 2'-O-methyl ribonucleotide
  modified_base 66..67: mod_base = OTHER; note = 2'-O-methyl ribonucleotide
  modified_base 70..72: mod_base = OTHER; note = 2'-O-methyl ribonucleotide
  modified_base 74..81: mod_base = OTHER; note = 2'-O-methyl ribonucleotide
  modified_base 83..100: mod_base = OTHER; note = 2'-O-methyl ribonucleotide
  modified_base 1..4: mod_base = OTHER; note = phosphorothioate linkage
  modified_base 97..100: mod_base = OTHER; note = phosphorothioate linkage
  misc_feature 1..3: note = RNA
  misc_feature 4..20: note = DNA
  misc_feature 21..100: note = RNA

SEQ ID NO: 542 - DNA, 100 bp, synthetic construct; identical to SEQ ID NO: 73
  source 1..100: mol_type = other DNA
  modified_base 1..3: mod_base = OTHER; note = 2'-O-methyl ribonucleotide
  modified_base 21: mod_base = OTHER; note = 2'-O-methyl ribonucleotide
  modified_base 28..32: mod_base = OTHER; note = 2'-O-methyl ribonucleotide
  modified_base 34..42: mod_base = OTHER; note = 2'-O-methyl ribonucleotide
  modified_base 46: mod_base = OTHER; note = 2'-O-methyl ribonucleotide
  modified_base 48: mod_base = OTHER; note = 2'-O-methyl ribonucleotide
  modified_base 50: mod_base = OTHER; note = 2'-O-methyl ribonucleotide
  modified_base 52..57: mod_base = OTHER; note = 2'-O-methyl ribonucleotide
  modified_base 60..61: mod_base = OTHER; note = 2'-O-methyl ribonucleotide
  modified_base 66..67: mod_base = OTHER; note = 2'-O-methyl ribonucleotide
  modified_base 70..72: mod_base = OTHER; note = 2'-O-methyl ribonucleotide
  modified_base 74..81: mod_base = OTHER; note = 2'-O-methyl ribonucleotide
  modified_base 83..100: mod_base = OTHER; note = 2'-O-methyl ribonucleotide
  modified_base 1..4: mod_base = OTHER; note = phosphorothioate linkage
  modified_base 97..100: mod_base = OTHER; note = phosphorothioate linkage
  misc_feature 1..3: note = RNA
  misc_feature 4..7: note = DNA
  misc_feature 8: note = RNA
  misc_feature 9: note = DNA
  misc_feature 10: note = RNA
  misc_feature 11: note = DNA
  misc_feature 12: note = RNA
  misc_feature 13: note = DNA
  misc_feature 14: note = RNA
  misc_feature 15: note = DNA
  misc_feature 16: note = RNA
  misc_feature 17: note = DNA
  misc_feature 18: note = RNA
  misc_feature 19: note = DNA
  misc_feature 20..100: note = RNA

SEQ ID NO: 543 - DNA, 100 bp, synthetic construct; identical to SEQ ID NO: 73
  source 1..100: mol_type = other DNA
  modified_base 1..3: mod_base = OTHER; note = 2'-O-methyl ribonucleotide
  modified_base 21: mod_base = OTHER; note = 2'-O-methyl ribonucleotide
  modified_base 28..32: mod_base = OTHER; note = 2'-O-methyl ribonucleotide
  modified_base 34..42: mod_base = OTHER; note = 2'-O-methyl ribonucleotide
  modified_base 46: mod_base = OTHER; note = 2'-O-methyl ribonucleotide
  modified_base 48: mod_base = OTHER; note = 2'-O-methyl ribonucleotide
  modified_base 50: mod_base = OTHER; note = 2'-O-methyl ribonucleotide
  modified_base 52..57: mod_base = OTHER; note = 2'-O-methyl ribonucleotide
  modified_base 60..61: mod_base = OTHER; note = 2'-O-methyl ribonucleotide
  modified_base 66..67: mod_base = OTHER; note = 2'-O-methyl ribonucleotide
  modified_base 70..72: mod_base = OTHER; note = 2'-O-methyl ribonucleotide
  modified_base 74..81: mod_base = OTHER; note = 2'-O-methyl ribonucleotide
  modified_base 83..100: mod_base = OTHER; note = 2'-O-methyl ribonucleotide
  modified_base 1..4: mod_base = OTHER; note = phosphorothioate linkage
  modified_base 97..100: mod_base = OTHER; note = phosphorothioate linkage
  misc_feature 1..3: note = RNA
  misc_feature 4..9: note = DNA
  misc_feature 10: note = RNA
  misc_feature 11: note = DNA
  misc_feature 12: note = RNA
  misc_feature 13: note = DNA
  misc_feature 14: note = RNA
  misc_feature 15: note = DNA
  misc_feature 16: note = RNA
  misc_feature 17: note = DNA
  misc_feature 18: note = RNA
  misc_feature 19: note = DNA
  misc_feature 20..100: note = RNA

SEQ ID NO: 544 - DNA, 100 bp, synthetic construct; identical to SEQ ID NO: 73
  source 1..100: mol_type = other DNA
  modified_base 1..3: mod_base = OTHER; note = 2'-O-methyl ribonucleotide
  modified_base 21: mod_base = OTHER; note = 2'-O-methyl ribonucleotide
  modified_base 28..32: mod_base = OTHER; note = 2'-O-methyl ribonucleotide
  modified_base 34..42: mod_base = OTHER; note = 2'-O-methyl ribonucleotide
  modified_base 46: mod_base = OTHER; note = 2'-O-methyl ribonucleotide
  modified_base 48: mod_base = OTHER; note = 2'-O-methyl ribonucleotide
  modified_base 50: mod_base = OTHER; note = 2'-O-methyl ribonucleotide
  modified_base 52..57: mod_base = OTHER; note = 2'-O-methyl ribonucleotide
  modified_base 60..61: mod_base = OTHER; note = 2'-O-methyl ribonucleotide
  modified_base 66..67: mod_base = OTHER; note = 2'-O-methyl ribonucleotide
  modified_base 70..72: mod_base = OTHER; note = 2'-O-methyl ribonucleotide
  modified_base 74..81: mod_base = OTHER; note = 2'-O-methyl ribonucleotide
  modified_base 83..100: mod_base = OTHER; note = 2'-O-methyl ribonucleotide
  modified_base 1..4: mod_base = OTHER; note = phosphorothioate linkage
  modified_base 97..100: mod_base = OTHER; note = phosphorothioate linkage
  misc_feature 1..3: note = RNA
  misc_feature 4..11: note = DNA
  misc_feature 12: note = RNA
  misc_feature 13: note = DNA
  misc_feature 14: note = RNA
  misc_feature 15: note = DNA
  misc_feature 16: note = RNA
  misc_feature 17: note = DNA
  misc_feature 18: note = RNA
  misc_feature 19: note = DNA
  misc_feature 20..100: note = RNA

SEQ ID NO: 545 - DNA, 100 bp, synthetic construct; identical to SEQ ID NO: 73
  source 1..100: mol_type = other DNA
  modified_base 1..3: mod_base = OTHER; note = 2'-O-methyl ribonucleotide
  modified_base 21: mod_base = OTHER; note = 2'-O-methyl ribonucleotide
  modified_base 28..32: mod_base = OTHER; note = 2'-O-methyl ribonucleotide
  modified_base 34..42: mod_base = OTHER; note = 2'-O-methyl ribonucleotide
  modified_base 46: mod_base = OTHER; note = 2'-O-methyl ribonucleotide
  modified_base 48: mod_base = OTHER; note = 2'-O-methyl ribonucleotide
  modified_base 50: mod_base = OTHER; note = 2'-O-methyl ribonucleotide
  modified_base 52..57: mod_base = OTHER; note = 2'-O-methyl ribonucleotide
  modified_base 60..61: mod_base = OTHER; note = 2'-O-methyl ribonucleotide
  modified_base 66..67: mod_base = OTHER; note = 2'-O-methyl ribonucleotide
  modified_base 70..72: mod_base = OTHER; note = 2'-O-methyl ribonucleotide
  modified_base 74..81: mod_base = OTHER; note = 2'-O-methyl ribonucleotide
  modified_base 83..100: mod_base = OTHER; note = 2'-O-methyl ribonucleotide
  modified_base 1..4: mod_base = OTHER; note = phosphorothioate linkage
  modified_base 97..100: mod_base = OTHER; note = phosphorothioate linkage
  misc_feature 1..3: note = RNA
  misc_feature 4..13: note = DNA
  misc_feature 14: note = RNA
  misc_feature 15: note = DNA
  misc_feature 16: note = RNA
  misc_feature 17: note = DNA
  misc_feature 18: note = RNA
  misc_feature 19: note = DNA
  misc_feature 20..100: note = RNA

SEQ ID NO: 546 - DNA, 100 bp, synthetic construct; identical to SEQ ID NO: 73
  source 1..100: mol_type = other DNA
  modified_base 1..3: mod_base = OTHER; note = 2'-O-methyl ribonucleotide
  modified_base 21: mod_base = OTHER; note = 2'-O-methyl ribonucleotide
  modified_base 28..32: mod_base = OTHER; note = 2'-O-methyl ribonucleotide
  modified_base 34..42: mod_base = OTHER; note = 2'-O-methyl ribonucleotide
  modified_base 46: mod_base = OTHER; note = 2'-O-methyl ribonucleotide
  modified_base 48: mod_base = OTHER; note = 2'-O-methyl ribonucleotide
  modified_base 50: mod_base = OTHER; note = 2'-O-methyl ribonucleotide
  modified_base 52..57: mod_base = OTHER; note = 2'-O-methyl ribonucleotide
  modified_base 60..61: mod_base = OTHER; note = 2'-O-methyl ribonucleotide
  modified_base 66..67: mod_base = OTHER; note = 2'-O-methyl ribonucleotide
  modified_base 70..72: mod_base = OTHER; note = 2'-O-methyl ribonucleotide
  modified_base 74..81: mod_base = OTHER; note = 2'-O-methyl ribonucleotide
  modified_base 83..100: mod_base = OTHER; note = 2'-O-methyl ribonucleotide
  modified_base 1..4: mod_base = OTHER; note = phosphorothioate linkage
  modified_base 97..100: mod_base = OTHER; note = phosphorothioate linkage
  misc_feature 1..3: note = RNA
  misc_feature 4..15: note = DNA
  misc_feature 16: note = RNA
  misc_feature 17: note = DNA
  misc_feature 18: note = RNA
  misc_feature 19: note = DNA
  misc_feature 20..100: note = RNA

SEQ ID NO: 547 - DNA, 100 bp, synthetic construct; identical to SEQ ID NO: 73
  source 1..100: mol_type = other DNA
  modified_base 1..3: mod_base = OTHER; note = 2'-O-methyl ribonucleotide
  modified_base 21: mod_base = OTHER; note = 2'-O-methyl ribonucleotide
  modified_base 28..32: mod_base = OTHER; note = 2'-O-methyl ribonucleotide
  modified_base 34..42: mod_base = OTHER; note = 2'-O-methyl ribonucleotide
  modified_base 46: mod_base = OTHER; note = 2'-O-methyl ribonucleotide
  modified_base 48: mod_base = OTHER; note = 2'-O-methyl ribonucleotide
  modified_base 50: mod_base = OTHER; note = 2'-O-methyl ribonucleotide
  modified_base 52..57: mod_base = OTHER; note = 2'-O-methyl ribonucleotide
  modified_base 60..61: mod_base = OTHER; note = 2'-O-methyl ribonucleotide
  modified_base 66..67: mod_base = OTHER; note = 2'-O-methyl ribonucleotide
  modified_base 70..72: mod_base = OTHER; note = 2'-O-methyl ribonucleotide
  modified_base 74..81: mod_base = OTHER; note = 2'-O-methyl ribonucleotide
  modified_base 83..100: mod_base = OTHER; note = 2'-O-methyl ribonucleotide
  modified_base 1..4: mod_base = OTHER; note = phosphorothioate linkage
  modified_base 97..100: mod_base = OTHER; note = phosphorothioate linkage
  misc_feature 1..3: note = RNA
  misc_feature 4..17: note = DNA
  misc_feature 18: note = RNA
  misc_feature 19: note = DNA
  misc_feature 20..100: note = RNA

SEQ ID NO: 548 - DNA, 100 bp, synthetic construct; identical to SEQ ID NO: 73
  source 1..100: mol_type = other DNA
  modified_base 1..3: mod_base = OTHER; note = 2'-O-methyl ribonucleotide
  modified_base 21: mod_base = OTHER; note = 2'-O-methyl ribonucleotide
  modified_base 28..32: mod_base = OTHER; note = 2'-O-methyl ribonucleotide
  modified_base 34..42: mod_base = OTHER; note = 2'-O-methyl ribonucleotide
  modified_base 46: mod_base = OTHER; note = 2'-O-methyl ribonucleotide
  modified_base 48: mod_base = OTHER; note = 2'-O-methyl ribonucleotide
  modified_base 50: mod_base = OTHER; note = 2'-O-methyl ribonucleotide
  modified_base 52..57: mod_base = OTHER; note = 2'-O-methyl ribonucleotide
  modified_base 60..61: mod_base = OTHER; note = 2'-O-methyl ribonucleotide
  modified_base 66..67: mod_base = OTHER; note = 2'-O-methyl ribonucleotide
  modified_base 70..72: mod_base = OTHER; note = 2'-O-methyl ribonucleotide
  modified_base 74..81: mod_base = OTHER; note = 2'-O-methyl ribonucleotide
  modified_base 83..100: mod_base = OTHER; note = 2'-O-methyl ribonucleotide
  modified_base 1..4: mod_base = OTHER; note = phosphorothioate linkage
  modified_base 97..100: mod_base = OTHER; note = phosphorothioate linkage
  misc_feature 1..3: note = RNA
  misc_feature 4..19: note = DNA
  misc_feature 20..100: note = RNA

SEQ ID NO: 549 - DNA, 100 bp, synthetic construct; identical to SEQ ID NO: 73
  source 1..100: mol_type = other DNA
  modified_base 1..3: mod_base = OTHER; note = 2'-O-methyl ribonucleotide
  modified_base 21: mod_base = OTHER; note = 2'-O-methyl ribonucleotide
  modified_base 28..32: mod_base = OTHER; note = 2'-O-methyl ribonucleotide
  modified_base 34..42: mod_base = OTHER; note = 2'-O-methyl ribonucleotide
  modified_base 46: mod_base = OTHER; note = 2'-O-methyl ribonucleotide
  modified_base 48: mod_base = OTHER; note = 2'-O-methyl ribonucleotide
  modified_base 50: mod_base = OTHER; note = 2'-O-methyl ribonucleotide
  modified_base 52..57: mod_base = OTHER; note = 2'-O-methyl ribonucleotide
  modified_base 60..61: mod_base = OTHER; note = 2'-O-methyl ribonucleotide
  modified_base 66..67: mod_base = OTHER; note = 2'-O-methyl ribonucleotide
  modified_base 70..72: mod_base = OTHER; note = 2'-O-methyl ribonucleotide
  modified_base 74..81: mod_base = OTHER; note = 2'-O-methyl ribonucleotide
  modified_base 83..100: mod_base = OTHER; note = 2'-O-methyl ribonucleotide
  modified_base 1..4: mod_base = OTHER; note = phosphorothioate linkage
  modified_base 97..100: mod_base = OTHER; note = phosphorothioate linkage
  misc_feature 1..4: note = RNA
  misc_feature 5: note = DNA
  misc_feature 6..14: note = RNA
  misc_feature 15: note = DNA
  misc_feature 16..100: note = RNA

SEQ ID NO: 550 - DNA, 100 bp, synthetic construct; identical to SEQ ID NO: 73
  source 1..100: mol_type = other DNA
  modified_base 1..3: mod_base = OTHER; note = 2'-O-methyl ribonucleotide
  modified_base 21: mod_base = OTHER; note = 2'-O-methyl ribonucleotide
  modified_base 28..32: mod_base = OTHER; note = 2'-O-methyl ribonucleotide
  modified_base 34..42: mod_base = OTHER; note = 2'-O-methyl ribonucleotide
  modified_base 46: mod_base = OTHER; note = 2'-O-methyl ribonucleotide
  modified_base 48: mod_base = OTHER; note = 2'-O-methyl ribonucleotide
  modified_base 50: mod_base = OTHER; note = 2'-O-methyl ribonucleotide
  modified_base 52..57: mod_base = OTHER; note = 2'-O-methyl ribonucleotide
  modified_base 60..61: mod_base = OTHER; note = 2'-O-methyl ribonucleotide
  modified_base 66..67: mod_base = OTHER; note = 2'-O-methyl ribonucleotide
  modified_base 70..72: mod_base = OTHER; note = 2'-O-methyl ribonucleotide
  modified_base 74..81: mod_base = OTHER; note = 2'-O-methyl ribonucleotide
  modified_base 83..100: mod_base = OTHER; note = 2'-O-methyl ribonucleotide
  modified_base 1..4: mod_base = OTHER; note = phosphorothioate linkage
  modified_base 97..100: mod_base = OTHER; note = phosphorothioate linkage
  misc_feature 1..5: note = RNA
  misc_feature 6: note = DNA
  misc_feature 7..15: note = RNA
  misc_feature 16: note = DNA
  misc_feature 17..100: note = RNA

SEQ ID NO: 551 - DNA, 100 bp, synthetic construct; identical to SEQ ID NO: 73
  source 1..100: mol_type = other DNA
  modified_base 1..3: mod_base = OTHER; note = 2'-O-methyl ribonucleotide
  modified_base 21: mod_base = OTHER; note = 2'-O-methyl ribonucleotide
  modified_base 28..32: mod_base = OTHER; note = 2'-O-methyl ribonucleotide
  modified_base 34..42: mod_base = OTHER; note = 2'-O-methyl ribonucleotide
  modified_base 46: mod_base = OTHER; note = 2'-O-methyl ribonucleotide
  modified_base 48: mod_base = OTHER; note = 2'-O-methyl ribonucleotide
  modified_base 50: mod_base = OTHER; note = 2'-O-methyl ribonucleotide
  modified_base 52..57: mod_base = OTHER; note = 2'-O-methyl ribonucleotide
  modified_base 60..61: mod_base = OTHER; note = 2'-O-methyl ribonucleotide
  modified_base 66..67: mod_base = OTHER; note = 2'-O-methyl ribonucleotide
  modified_base 70..72: mod_base = OTHER; note = 2'-O-methyl ribonucleotide
  modified_base 74..81: mod_base = OTHER; note = 2'-O-methyl ribonucleotide
  modified_base 83..100: mod_base = OTHER; note = 2'-O-methyl ribonucleotide
  modified_base 1..4: mod_base = OTHER; note = phosphorothioate linkage
  modified_base 97..100: mod_base = OTHER; note = phosphorothioate linkage
  misc_feature 1..9: note = RNA
  misc_feature 10: note = DNA
  misc_feature 11..12: note = RNA
  misc_feature 13: note = DNA
  misc_feature 14..17: note = RNA
  misc_feature 18: note = DNA
  misc_feature 19..100: note = RNA

SEQ ID NO: 552 - DNA, 100 bp, synthetic construct; identical to SEQ ID NO: 73
  source 1..100: mol_type = other DNA
  modified_base 1..3: mod_base = OTHER; note = 2'-O-methyl ribonucleotide
  modified_base 21: mod_base = OTHER; note = 2'-O-methyl ribonucleotide
  modified_base 28..32: mod_base = OTHER; note = 2'-O-methyl ribonucleotide
  modified_base 34..42: mod_base = OTHER; note = 2'-O-methyl ribonucleotide
  modified_base 46: mod_base = OTHER; note = 2'-O-methyl ribonucleotide
  modified_base 48: mod_base = OTHER; note = 2'-O-methyl ribonucleotide
  modified_base 50: mod_base = OTHER; note = 2'-O-methyl ribonucleotide
  modified_base 52..57: mod_base = OTHER; note = 2'-O-methyl ribonucleotide
  modified_base 60..61: mod_base = OTHER; note = 2'-O-methyl ribonucleotide
  modified_base 66..67: mod_base = OTHER; note = 2'-O-methyl ribonucleotide
  modified_base 70..72: mod_base = OTHER; note = 2'-O-methyl ribonucleotide
  modified_base 74..81: mod_base = OTHER; note = 2'-O-methyl ribonucleotide
  modified_base 83..100: mod_base = OTHER; note = 2'-O-methyl ribonucleotide
  modified_base 1..4: mod_base = OTHER; note = phosphorothioate linkage
  modified_base 97..100: mod_base = OTHER; note = phosphorothioate linkage
  misc_feature 1..3: note = RNA
  misc_feature 4..6: note = DNA
  misc_feature 7..100: note = RNA

SEQ ID NO: 553 - DNA, 100 bp, synthetic construct; identical to SEQ ID NO: 73
  source 1..100: mol_type = other DNA
  modified_base 1..2: mod_base = OTHER; note = 2'-O-methyl ribonucleotide
  modified_base 21: mod_base = OTHER; note = 2'-O-methyl ribonucleotide
  modified_base 28..32: mod_base = OTHER; note = 2'-O-methyl ribonucleotide
  modified_base 34..42: mod_base = OTHER; note = 2'-O-methyl ribonucleotide
  modified_base 46: mod_base = OTHER; note = 2'-O-methyl ribonucleotide
  modified_base 48: mod_base = OTHER; note = 2'-O-methyl ribonucleotide
  modified_base 50: mod_base = OTHER; note = 2'-O-methyl ribonucleotide
  modified_base 52..57: mod_base = OTHER; note = 2'-O-methyl ribonucleotide
  modified_base 60..61: mod_base = OTHER; note = 2'-O-methyl ribonucleotide
  modified_base 66..67: mod_base = OTHER; note = 2'-O-methyl ribonucleotide
  modified_base 70..72: mod_base = OTHER; note = 2'-O-methyl ribonucleotide
  modified_base 74..81: mod_base = OTHER; note = 2'-O-methyl ribonucleotide
  modified_base 83..100: mod_base = OTHER; note = 2'-O-methyl ribonucleotide
  modified_base 1..4: mod_base = OTHER; note = phosphorothioate linkage
  modified_base 97..100: mod_base = OTHER; note = phosphorothioate linkage
  misc_feature 1..2: note = RNA
  misc_feature 3..6: note = DNA
  misc_feature 7..100: note = RNA

SEQ ID NO: 554 - DNA, 100 bp, synthetic construct; identical to SEQ ID NO: 73
  source 1..100: mol_type = other DNA
  modified_base 1..3: mod_base = OTHER; note = 2'-O-methyl ribonucleotide
  modified_base 21: mod_base = OTHER; note = 2'-O-methyl ribonucleotide
  modified_base 28..32: mod_base = OTHER; note = 2'-O-methyl ribonucleotide
  modified_base 34..42: mod_base = OTHER; note = 2'-O-methyl ribonucleotide
  modified_base 46: mod_base = OTHER; note = 2'-O-methyl ribonucleotide
  modified_base 48: mod_base = OTHER; note = 2'-O-methyl ribonucleotide
  modified_base 50: mod_base = OTHER; note = 2'-O-methyl ribonucleotide
  modified_base 52..57: mod_base = OTHER; note = 2'-O-methyl ribonucleotide
  modified_base 60..61: mod_base = OTHER; note = 2'-O-methyl ribonucleotide
  modified_base 66..67: mod_base = OTHER; note = 2'-O-methyl ribonucleotide
  modified_base 70..72: mod_base = OTHER; note = 2'-O-methyl ribonucleotide
  modified_base 74..81: mod_base = OTHER; note = 2'-O-methyl ribonucleotide
  modified_base 83..100: mod_base = OTHER; note = 2'-O-methyl ribonucleotide
  modified_base 1..4: mod_base = OTHER; note = phosphorothioate linkage
  modified_base 97..100: mod_base = OTHER; note = phosphorothioate linkage
  misc_feature 1..3: note = RNA
  misc_feature 4..7: note = DNA
  misc_feature 8..100: note = RNA

SEQ ID NO: 555 - DNA, 100 bp, synthetic construct; identical to SEQ ID NO: 73
  source 1..100: mol_type = other DNA
  modified_base 1..2: mod_base = OTHER; note = 2'-O-methyl ribonucleotide
  modified_base 21: mod_base = OTHER; note = 2'-O-methyl ribonucleotide
  modified_base 28..32: mod_base = OTHER; note = 2'-O-methyl ribonucleotide
  modified_base 34..42: mod_base = OTHER; note = 2'-O-methyl ribonucleotide
  modified_base 46: mod_base = OTHER; note = 2'-O-methyl ribonucleotide
  modified_base 48: mod_base = OTHER; note = 2'-O-methyl ribonucleotide
  modified_base 50: mod_base = OTHER; note = 2'-O-methyl ribonucleotide
  modified_base 52..57: mod_base = OTHER; note = 2'-O-methyl ribonucleotide
  modified_base 60..61: mod_base = OTHER; note = 2'-O-methyl ribonucleotide
  modified_base 66..67: mod_base = OTHER; note = 2'-O-methyl ribonucleotide
  modified_base 70..72: mod_base = OTHER; note = 2'-O-methyl ribonucleotide
  modified_base 74..81: mod_base = OTHER; note = 2'-O-methyl ribonucleotide
  modified_base 83..100: mod_base = OTHER; note = 2'-O-methyl ribonucleotide
  modified_base 1..4: mod_base = OTHER; note = phosphorothioate linkage
  modified_base 97..100: mod_base = OTHER; note = phosphorothioate linkage
  misc_feature 1..2: note = RNA
  misc_feature 3..7: note = DNA
  misc_feature 8..100: note = RNA

SEQ ID NO: 556 - DNA, 100 bp, synthetic construct; identical to SEQ ID NO: 73
  source 1..100: mol_type = other DNA
  modified_base 1..3: mod_base = OTHER; note = 2'-O-methyl ribonucleotide
  modified_base 21: mod_base = OTHER; note = 2'-O-methyl ribonucleotide
  modified_base 28..32: mod_base = OTHER; note = 2'-O-methyl ribonucleotide
  modified_base 34..42: mod_base = OTHER; note = 2'-O-methyl ribonucleotide
  modified_base 46: mod_base = OTHER; note = 2'-O-methyl ribonucleotide
  modified_base 48: mod_base = OTHER; note = 2'-O-methyl ribonucleotide
  modified_base 50: mod_base = OTHER; note = 2'-O-methyl ribonucleotide
  modified_base 52..57: mod_base = OTHER; note = 2'-O-methyl ribonucleotide
  modified_base 60..61: mod_base = OTHER; note = 2'-O-methyl ribonucleotide
  modified_base 66..67: mod_base = OTHER; note = 2'-O-methyl ribonucleotide
  modified_base 70..72: mod_base = OTHER; note = 2'-O-methyl ribonucleotide
  modified_base 74..81: mod_base = OTHER; note = 2'-O-methyl ribonucleotide
  modified_base 83..100: mod_base = OTHER; note = 2'-O-methyl ribonucleotide
  modified_base 1..4: mod_base = OTHER; note = phosphorothioate linkage
  modified_base 97..100: mod_base = OTHER; note = phosphorothioate linkage
  misc_feature 1..3: note = RNA
  misc_feature 4..8: note = DNA
  misc_feature 9..100: note = RNA

SEQ ID NO: 557 - DNA, 100 bp, synthetic construct; identical to SEQ ID NO: 73
  source 1..100: mol_type = other DNA
  modified_base 1..2: mod_base = OTHER; note = 2'-O-methyl ribonucleotide
  modified_base 21: mod_base = OTHER; note = 2'-O-methyl ribonucleotide
  modified_base 28..32: mod_base = OTHER; note = 2'-O-methyl ribonucleotide
  modified_base 34..42: mod_base = OTHER; note = 2'-O-methyl ribonucleotide
  modified_base 46: mod_base = OTHER; note = 2'-O-methyl ribonucleotide
  modified_base 48: mod_base = OTHER; note = 2'-O-methyl ribonucleotide
  modified_base 50: mod_base = OTHER; note = 2'-O-methyl ribonucleotide
  modified_base 52..57: mod_base = OTHER; note = 2'-O-methyl ribonucleotide
  modified_base 60..61: mod_base = OTHER; note = 2'-O-methyl ribonucleotide
  modified_base 66..67: mod_base = OTHER; note = 2'-O-methyl ribonucleotide
  modified_base 70..72: mod_base = OTHER; note = 2'-O-methyl ribonucleotide
  modified_base 74..81: mod_base = OTHER; note = 2'-O-methyl ribonucleotide
  modified_base 83..100: mod_base = OTHER; note = 2'-O-methyl ribonucleotide
  modified_base 1..4: mod_base = OTHER; note = phosphorothioate linkage
  modified_base 97..100: mod_base = OTHER; note = phosphorothioate linkage
  misc_feature 1..2: note = RNA
  misc_feature 3..8: note = DNA
  misc_feature 9..100: note = RNA

SEQ ID NO: 558 - RNA, 100 nt, synthetic construct
  source 1..100: mol_type = other RNA
  modified_base 1..3: mod_base = OTHER; note = 2'-O-methyl ribonucleotide
  modified_base 21: mod_base = OTHER; note = 2'-O-methyl ribonucleotide
  modified_base 28..32: mod_base = OTHER; note = 2'-O-methyl ribonucleotide
  modified_base 34..42: mod_base = OTHER; note = 2'-O-methyl ribonucleotide
  modified_base 46: mod_base = OTHER; note = 2'-O-methyl ribonucleotide
  modified_base 48: mod_base = OTHER; note = 2'-O-methyl ribonucleotide
  modified_base 50: mod_base = OTHER; note = 2'-O-methyl ribonucleotide
  modified_base 52..57: mod_base = OTHER; note = 2'-O-methyl ribonucleotide
  modified_base 60..61: mod_base = OTHER; note = 2'-O-methyl ribonucleotide
  modified_base 66..67: mod_base = OTHER; note = 2'-O-methyl ribonucleotide
  modified_base 70..72: mod_base = OTHER; note = 2'-O-methyl ribonucleotide
  modified_base 74..81: mod_base = OTHER; note = 2'-O-methyl ribonucleotide
  modified_base 83..100: mod_base = OTHER; note = 2'-O-methyl ribonucleotide
  modified_base 1..4: mod_base = OTHER; note = phosphorothioate linkage
  modified_base 97..100: mod_base = OTHER; note = phosphorothioate linkage
  misc_difference 5: note = zebularine or 4-deoxyuridine / 4-deazacytidine
aaganacctgaataactctcgttttagagctagaaatagcaagttaaaataaggctagtccgttatcaacttgaaaaagtggcaccgagtcggtgctttt

SEQ ID NO: 559 - RNA, 100 nt, synthetic construct
  source 1..100: mol_type = other RNA
  modified_base 1..3: mod_base = OTHER; note = 2'-O-methyl ribonucleotide
  modified_base 21: mod_base = OTHER; note = 2'-O-methyl ribonucleotide
  modified_base 28..32: mod_base = OTHER; note = 2'-O-methyl ribonucleotide
  modified_base 34..42: mod_base = OTHER; note = 2'-O-methyl ribonucleotide
  modified_base 46: mod_base = OTHER; note = 2'-O-methyl ribonucleotide
  modified_base 48: mod_base = OTHER; note = 2'-O-methyl ribonucleotide
  modified_base 50: mod_base = OTHER; note = 2'-O-methyl ribonucleotide
  modified_base 52..57: mod_base = OTHER; note = 2'-O-methyl ribonucleotide
  modified_base 60..61: mod_base = OTHER; note = 2'-O-methyl ribonucleotide
  modified_base 66..67: mod_base = OTHER; note = 2'-O-methyl ribonucleotide
  modified_base 70..72: mod_base = OTHER; note = 2'-O-methyl ribonucleotide
  modified_base 74..81: mod_base = OTHER; note = 2'-O-methyl ribonucleotide
  modified_base 83..100: mod_base = OTHER; note = 2'-O-methyl ribonucleotide
  modified_base 1..4: mod_base = OTHER; note = phosphorothioate linkage
  modified_base 97..100: mod_base = OTHER; note = phosphorothioate linkage
  misc_difference 8: note = zebularine or 4-deoxyuridine or 4-deazacytidine
aagatacntgaataactctcgttttagagctagaaatagcaagttaaaataaggctagtccgttatcaacttgaaaaagtggcaccgagtcggtgctttt

SEQ ID NO: 560 - RNA, 100 nt, synthetic construct
  source 1..100: mol_type = other RNA
  modified_base 1..3: mod_base = OTHER; note = 2'-O-methyl ribonucleotide
  modified_base 21: mod_base = OTHER; note = 2'-O-methyl ribonucleotide
  modified_base 28..32: mod_base = OTHER; note = 2'-O-methyl ribonucleotide
  modified_base 34..42: mod_base = OTHER; note = 2'-O-methyl ribonucleotide
  modified_base 46: mod_base = OTHER; note = 2'-O-methyl ribonucleotide
  modified_base 48: mod_base = OTHER; note = 2'-O-methyl ribonucleotide
  modified_base 50: mod_base = OTHER; note = 2'-O-methyl ribonucleotide
  modified_base 52..57: mod_base = OTHER; note = 2'-O-methyl ribonucleotide
  modified_base 60..61: mod_base = OTHER; note = 2'-O-methyl ribonucleotide
  modified_base 66..67: mod_base = OTHER; note = 2'-O-methyl ribonucleotide
  modified_base 70..72: mod_base = OTHER; note = 2'-O-methyl ribonucleotide
  modified_base 74..81: mod_base = OTHER; note = 2'-O-methyl ribonucleotide
  modified_base 83..100: mod_base = OTHER; note = 2'-O-methyl ribonucleotide
  modified_base 1..4: mod_base = OTHER; note = phosphorothioate linkage
  modified_base 97..100: mod_base = OTHER; note = phosphorothioate linkage
  misc_difference 5: note = zebularine or 4-deoxyuridine / 4-deazacytidine
  misc_difference 8: note = zebularine or 4-deoxyuridine / 4-deazacytidine
aaganacntgaataactctcgttttagagctagaaatagcaagttaaaataaggctagtccgttatcaacttgaaaaagtggcaccgagtcggtgctttt

SEQ ID NO: 561 - RNA, 100 nt, synthetic construct
  source 1..100: mol_type = other RNA
  modified_base 1..3: mod_base = OTHER; note = 2'-O-methyl ribonucleotide
  modified_base 21: mod_base = OTHER; note = 2'-O-methyl ribonucleotide
  modified_base 28..32: mod_base = OTHER; note = 2'-O-methyl ribonucleotide
  modified_base 34..42: mod_base = OTHER; note = 2'-O-methyl ribonucleotide
  modified_base 46: mod_base = OTHER; note = 2'-O-methyl ribonucleotide
  modified_base 48: mod_base = OTHER; note = 2'-O-methyl ribonucleotide
  modified_base 50: mod_base = OTHER; note = 2'-O-methyl ribonucleotide
  modified_base 52..57: mod_base = OTHER; note = 2'-O-methyl ribonucleotide
  modified_base 60..61: mod_base = OTHER; note = 2'-O-methyl ribonucleotide
  modified_base 66..67: mod_base = OTHER; note = 2'-O-methyl ribonucleotide
  modified_base 70..72: mod_base = OTHER; note = 2'-O-methyl ribonucleotide
  modified_base 74..81: mod_base = OTHER; note = 2'-O-methyl ribonucleotide
  modified_base 83..100: mod_base = OTHER; note = 2'-O-methyl ribonucleotide
  modified_base 1..4: mod_base = OTHER; note = phosphorothioate linkage
  modified_base 97..100: mod_base = OTHER; note = phosphorothioate linkage
  misc_difference 5: note = zebularine or 4-deoxyuridine / 4-deazacytidine
  misc_difference 9: note = zebularine or 4-deoxyuridine / 4-deazacytidine
aaganaccngaataactctcgttttagagctagaaatagcaagttaaaataaggctagtccgttatcaacttgaaaaagtggcaccgagtcggtgctttt

SEQ ID NO: 562 - RNA, 100 nt, synthetic construct
  source 1..100: mol_type = other RNA
  modified_base 1..3: mod_base = OTHER; note = 2'-O-methyl ribonucleotide
  modified_base 21..100: mod_base = OTHER; note = 2'-O-methyl ribonucleotide
  modified_base 1..4: mod_base = OTHER; note = phosphorothioate linkage
  modified_base 97..100: mod_base = OTHER; note = phosphorothioate linkage
  modified_base 13: mod_base = OTHER; note = pseudouridine
aagatacctgaanaaccctcgttttagagctagaaatagcaagttaaaataaggctagtccgttatcaacttgaaaaagtggcaccgagtcggtgctttt

SEQ ID NO: 563 - RNA, 100 nt, synthetic construct; identical to SEQ ID NO: 562
  source 1..100: mol_type = other RNA
  modified_base 1..3: mod_base = OTHER; note = 2'-O-methyl ribonucleotide
  modified_base 21..100: mod_base = OTHER; note = 2'-O-methyl ribonucleotide
  modified_base 1..4: mod_base = OTHER; note = phosphorothioate linkage
  modified_base 97..100: mod_base = OTHER; note = phosphorothioate linkage
  modified_base 13: mod_base = OTHER; note = N1m-pseudouridine

SEQ ID NO: 564 - DNA, 100 bp, synthetic construct
  source 1..100: mol_type = other DNA
  modified_base 1..3: mod_base = OTHER; note = 2'-O-methyl ribonucleotide
  modified_base 21..100: mod_base = OTHER; note = 2'-O-methyl ribonucleotide
  modified_base 1..4: mod_base = OTHER; note = phosphorothioate linkage
  modified_base 97..100: mod_base = OTHER; note = phosphorothioate linkage
  modified_base 13: mod_base = OTHER; note = 2'-deoxyethynylmethylpyridone-cytidine
  misc_feature 1..12: note = RNA
  misc_feature 13: note = DNA
  misc_feature 14..100: note = RNA
aagatacctgaanaaccctcgttttagagctagaaatagcaagttaaaataaggctagtccgttatcaacttgaaaaagtggcaccgagtcggtgctttt

SEQ ID NO: 565 - RNA, 100 nt, synthetic construct; identical to SEQ ID NO: 69
  source 1..100: mol_type = other RNA
  modified_base 1..3: mod_base = OTHER; note = 2'-O-methyl ribonucleotide
  modified_base 21..100: mod_base = OTHER; note = 2'-O-methyl ribonucleotide
  modified_base 1..4: mod_base = OTHER; note = phosphorothioate linkage
  modified_base 97..100: mod_base = OTHER; note = phosphorothioate linkage

SEQ ID NO: 566 - RNA, 100 nt, synthetic construct
  source 1..100: mol_type = other RNA
  modified_base 1..3: mod_base = OTHER; note = 2'-O-methyl ribonucleotide
  modified_base 21..100: mod_base = OTHER; note = 2'-O-methyl ribonucleotide
  modified_base 1..4: mod_base = OTHER; note = phosphorothioate linkage
  modified_base 97..100: mod_base = OTHER; note = phosphorothioate linkage
  modified_base 13: mod_base = OTHER; note = pseudouridine
aagataccngaataaccctcgttttagagctagaaatagcaagttaaaataaggctagtccgttatcaacttgaaaaagtggcaccgagtcggtgctttt

SEQ ID NO: 567 - RNA, 100 nt, synthetic construct; identical to SEQ ID NO: 566
  source 1..100: mol_type = other RNA
  modified_base 1..3: mod_base = OTHER; note = 2'-O-methyl ribonucleotide
  modified_base 21..100: mod_base = OTHER; note = 2'-O-methyl ribonucleotide
  modified_base 1..4: mod_base = OTHER; note = phosphorothioate linkage
  modified_base 97..100: mod_base = OTHER; note = phosphorothioate linkage
  modified_base 9: mod_base = OTHER; note = N1m-pseudouridine

SEQ ID NO: 568 - DNA, 100 bp, synthetic construct
  source 1..100: mol_type = other DNA
  modified_base 1..3: mod_base = OTHER; note = 2'-O-methyl ribonucleotide
  modified_base 21..100: mod_base = OTHER; note = 2'-O-methyl ribonucleotide
  modified_base 1..4: mod_base = OTHER; note = phosphorothioate linkage
  modified_base 97..100: mod_base = OTHER; note = phosphorothioate linkage
  modified_base 9: mod_base = OTHER; note = 2'-deoxyethynylmethylpyridone-cytidine
  misc_feature 1..8: note = RNA
  misc_feature 9: note = DNA
  misc_feature 10..100: note = RNA
aagataccngaataaccctcgttttagagctagaaatagcaagttaaaataaggctagtccgttatcaacttgaaaaagtggcaccgagtcggtgctttt

SEQ ID NO: 569 - DNA, 100 bp, synthetic construct; identical to SEQ ID NO: 72
  source 1..100: mol_type = other DNA
  modified_base 1..3: mod_base = OTHER; note = 2'-O-methyl ribonucleotide
  modified_base 21..100: mod_base = OTHER; note = 2'-O-methyl ribonucleotide
  modified_base 1..4: mod_base = OTHER; note = phosphorothioate linkage
  modified_base 97..100: mod_base = OTHER; note = phosphorothioate linkage
  misc_feature 1..8: note = RNA
  misc_feature 9: note = DNA
  misc_feature 10..100: note = RNA

SEQ ID NO: 570 - RNA, 100 nt, synthetic construct
  source 1..100: mol_type = other RNA
  modified_base 1..3: mod_base = OTHER; note = 2'-O-methyl ribonucleotide
  modified_base 21..100: mod_base = OTHER; note = 2'-O-methyl ribonucleotide
  modified_base 1..4: mod_base = OTHER; note = phosphorothioate linkage
  modified_base 97..100: mod_base = OTHER; note = phosphorothioate linkage
aagataccygaayaaccctcgttttagagctagaaatagcaagttaaaataaggctagtccgttatcaacttgaaaaagtggcaccgagtcggtgctttt

SEQ ID NO: 571 - RNA, 100 nt, synthetic construct
  source 1..100: mol_type = other RNA
  modified_base 1..3: mod_base = OTHER; note = 2'-O-methyl ribonucleotide
  modified_base 21..100: mod_base = OTHER; note = 2'-O-methyl ribonucleotide
  modified_base 1..4: mod_base = OTHER; note = phosphorothioate linkage
  modified_base 97..100: mod_base = OTHER; note = phosphorothioate linkage
  modified_base 9: mod_base = OTHER; note = N1m-pseudouridine
  modified_base 13: mod_base = OTHER; note = N1m-pseudouridine
aagataccngaanaaccctcgttttagagctagaaatagcaagttaaaataaggctagtccgttatcaacttgaaaaagtggcaccgagtcggtgctttt

SEQ ID NO: 572 - DNA, 100 bp, synthetic construct
  source 1..100: mol_type = other DNA
  modified_base 1..3: mod_base = OTHER; note = 2'-O-methyl ribonucleotide
  modified_base 21..100: mod_base = OTHER; note = 2'-O-methyl ribonucleotide
  modified_base 1..4: mod_base = OTHER; note = phosphorothioate linkage
  modified_base 97..100: mod_base = OTHER; note = phosphorothioate linkage
  modified_base 9: mod_base = OTHER; note = 2'-deoxyethynylmethylpyridone-cytidine
  modified_base 13: mod_base = OTHER; note = 2'-deoxyethynylmethylpyridone-cytidine
  misc_feature 1..8: note = RNA
  misc_feature 9: note = DNA
  misc_feature 10..12: note = RNA
  misc_feature 13: note = DNA
  misc_feature 14..100: note = RNA
aagataccngaanaaccctcgttttagagctagaaatagcaagttaaaataaggctagtccgttatcaacttgaaaaagtggcaccgagtcggtgctttt

SEQ ID NO: 573 - DNA, 100 bp, synthetic construct; identical to SEQ ID NO: 72
  source 1..100: mol_type = other DNA
  modified_base 1..3: mod_base = OTHER; note = 2'-O-methyl ribonucleotide
  modified_base 21..100: mod_base = OTHER; note = 2'-O-methyl ribonucleotide
  modified_base 1..4: mod_base = OTHER; note = phosphorothioate linkage
  modified_base 97..100: mod_base = OTHER; note = phosphorothioate linkage
  misc_feature 1..8: note = RNA
  misc_feature 9: note = DNA
  misc_feature 10..12: note = RNA
  misc_feature 13: note = DNA
  misc_feature 14..100: note = RNA

SEQ ID NO: 574 - RNA, 100 nt, synthetic construct
  source 1..100: mol_type = other RNA
  modified_base 1..3: mod_base = OTHER; note = 2'-O-methyl ribonucleotide
  modified_base 21..100: mod_base = OTHER; note = 2'-O-methyl ribonucleotide
  modified_base 1..4: mod_base = OTHER; note = phosphorothioate linkage
  modified_base 97..100: mod_base = OTHER; note = phosphorothioate linkage
  modified_base 12: mod_base = OTHER; note = 2,6-diaminopurine
aagatacctgantaaccctcgttttagagctagaaatagcaagttaaaataaggctagtccgttatcaacttgaaaaagtggcaccgagtcggtgctttt

SEQ ID NO: 575 - RNA, 100 nt, synthetic construct
  source 1..100: mol_type = other RNA
  modified_base 1..3: mod_base = OTHER; note = 2'-O-methyl ribonucleotide
  modified_base 21..100: mod_base = OTHER; note = 2'-O-methyl ribonucleotide
  modified_base 1..4: mod_base = OTHER; note = phosphorothioate linkage
  modified_base 97..100: mod_base = OTHER; note = phosphorothioate linkage
  modified_base 14: mod_base = OTHER; note = 2,6-diaminopurine
aagatacctgaatnaccctcgttttagagctagaaatagcaagttaaaataaggctagtccgttatcaacttgaaaaagtggcaccgagtcggtgctttt

SEQ ID NO: 576 - RNA, 100 nt, synthetic construct
  source 1..100: mol_type = other RNA
  modified_base 1..3: mod_base = OTHER; note = 2'-O-methyl ribonucleotide
  modified_base 21..100: mod_base = OTHER; note = 2'-O-methyl ribonucleotide
  modified_base 1..4: mod_base = OTHER; note = phosphorothioate linkage
  modified_base 97..100: mod_base = OTHER; note = phosphorothioate linkage
  modified_base 12: mod_base = OTHER; note = 2,6-diaminopurine
  modified_base 14: mod_base = OTHER; note = 2,6-diaminopurine
aagatacctgantnaccctcgttttagagctagaaatagcaagttaaaataaggctagtccgttatcaacttgaaaaagtggcaccgagtcggtgctttt

SEQ ID NO: 577 - DNA, 100 bp, synthetic construct; identical to SEQ ID NO: 72
  source 1..100: mol_type = other DNA
  modified_base 1..3: mod_base = OTHER; note = 2'-O-methyl ribonucleotide
  modified_base 21..100: mod_base = OTHER; note = 2'-O-methyl ribonucleotide
  modified_base 1..4: mod_base = OTHER; note = phosphorothioate linkage
  modified_base 97..100: mod_base = OTHER; note = phosphorothioate linkage
  misc_feature 1..12: note = RNA
  misc_feature 13: note = DNA
  misc_feature 14..100: note = RNA

SEQ ID NO: 578 - DNA, 100 bp, synthetic construct; identical to SEQ ID NO: 72
  source 1..100: mol_type = other DNA
  modified_base 1..3: mod_base = OTHER; note = 2'-O-methyl ribonucleotide
  modified_base 21..100: mod_base = OTHER; note = 2'-O-methyl ribonucleotide
  modified_base 1..4: mod_base = OTHER; note = phosphorothioate linkage
  modified_base 97..100: mod_base = OTHER; note = phosphorothioate linkage
  misc_feature 1..12: note = RNA
  misc_feature 13: note = DNA
  misc_feature 14..100: note = RNA

SEQ ID NO: 579 - DNA, 100 bp, synthetic construct; identical to SEQ ID NO: 72
  source 1..100: mol_type = other DNA
  modified_base 1..3: mod_base = OTHER; note = 2'-O-methyl ribonucleotide
  modified_base 21..100: mod_base = OTHER; note = 2'-O-methyl ribonucleotide
  modified_base 1..4: mod_base = OTHER; note = phosphorothioate linkage
  modified_base 97..100: mod_base = OTHER; note = phosphorothioate linkage
  misc_feature 1..4: note = RNA
  misc_feature 5: note = DNA
  misc_feature 6..12: note = RNA
  misc_feature 13: note = DNA
  misc_feature 14..100: note = RNA

SEQ ID NO: 580 - DNA, 100 bp, synthetic construct; identical to SEQ ID NO: 72
  source 1..100: mol_type = other DNA
  modified_base 1..3: mod_base = OTHER; note = 2'-O-methyl ribonucleotide
  modified_base 21..100: mod_base = OTHER; note = 2'-O-methyl ribonucleotide
  modified_base 1..4: mod_base = OTHER; note = phosphorothioate linkage
  modified_base 97..100: mod_base = OTHER; note = phosphorothioate linkage
  misc_feature 1..9: note = RNA
  misc_feature 10: note = DNA
  misc_feature 11..100: note = RNA

SEQ ID NO: 581 - RNA, 100 nt, synthetic construct; identical to SEQ ID NO: 69
  source 1..100: mol_type = other RNA
  modified_base 1..3: mod_base = OTHER; note = Locked nucleic acid
  modified_base 21..100: mod_base = OTHER; note = 2'-O-methyl ribonucleotide
  modified_base 1..4: mod_base = OTHER; note = phosphorothioate linkage
  modified_base 97..100: mod_base = OTHER; note = phosphorothioate linkage

SEQ ID NO: 582 - RNA, 100 nt, synthetic construct; identical to SEQ ID NO: 69
  source 1..100: mol_type = other RNA
  modified_base 1..3: mod_base = OTHER; note = 2'-O-methyl ribonucleotide
  modified_base 6..7: mod_base = OTHER; note = Locked nucleic acid
  modified_base 21..100: mod_base = OTHER; note = 2'-O-methyl ribonucleotide
  modified_base 1..4: mod_base = OTHER; note = phosphorothioate linkage
  modified_base 97..100: mod_base = OTHER; note = phosphorothioate linkage

SEQ ID NO: 583 - DNA, 100 bp, synthetic construct; identical to SEQ ID NO: 72
  source 1..100: mol_type = other DNA
  modified_base 1..3: mod_base = OTHER; note = 2'-O-methyl ribonucleotide
  modified_base 21..100: mod_base = OTHER; note = 2'-O-methyl ribonucleotide
  modified_base 1..4: mod_base = OTHER; note = phosphorothioate linkage
  modified_base 97..100: mod_base = OTHER; note = phosphorothioate linkage
  misc_feature 1..3: note = RNA
  misc_feature 4: note = DNA
  misc_feature 5..100: note = RNA

SEQ ID NO: 584 - DNA, 100 bp, synthetic construct; identical to SEQ ID NO: 72
  source 1..100: mol_type = other DNA
  modified_base 1..3: mod_base = OTHER; note = 2'-O-methyl ribonucleotide
  modified_base 21..100: mod_base = OTHER; note = 2'-O-methyl ribonucleotide
  modified_base 1..4: mod_base = OTHER; note = phosphorothioate linkage
  modified_base 97..100: mod_base = OTHER; note = phosphorothioate linkage
  misc_feature 1..4: note = RNA
  misc_feature 5: note = DNA
  misc_feature 6..100: note = RNA

SEQ ID NO: 585 - DNA, 100 bp, synthetic construct; identical to SEQ ID NO: 72
  source 1..100: mol_type = other DNA
  modified_base 1..3: mod_base = OTHER; note = 2'-O-methyl ribonucleotide
  modified_base 21..100: mod_base = OTHER; note = 2'-O-methyl ribonucleotide
  modified_base 1..4: mod_base = OTHER; note = phosphorothioate linkage
  modified_base 97..100: mod_base = OTHER; note = phosphorothioate linkage
  misc_feature 1..5: note = RNA
  misc_feature 6: note = DNA
  misc_feature 7..100: note = RNA

SEQ ID NO: 586 - DNA, 100 bp, synthetic construct; identical to SEQ ID NO: 72
  source 1..100: mol_type = other DNA
  modified_base 1..3: mod_base = OTHER; note = 2'-O-methyl ribonucleotide
  modified_base 21..100: mod_base = OTHER; note = 2'-O-methyl ribonucleotide
  modified_base 1..4: mod_base = OTHER; note = phosphorothioate linkage
  modified_base 97..100: mod_base = OTHER; note = phosphorothioate linkage
  misc_feature 1..6: note = RNA
  misc_feature 7: note = DNA
  misc_feature 8..100: note = RNA

SEQ ID NO: 587 - DNA, 100 bp, synthetic construct; identical to SEQ ID NO: 72
  source 1..100: mol_type = other DNA
  modified_base 1..3: mod_base = OTHER; note = 2'-O-methyl ribonucleotide
  modified_base 21..100: mod_base = OTHER; note = 2'-O-methyl ribonucleotide
  modified_base 1..4: mod_base = OTHER; note = phosphorothioate linkage
  modified_base 97..100: mod_base = OTHER; note = phosphorothioate linkage
  misc_feature 1..8: note = RNA
  misc_feature 9: note = DNA
  misc_feature 10..100: note = RNA

SEQ ID NO: 588 - DNA, 100 bp, synthetic construct; identical to SEQ ID NO: 72
  source 1..100: mol_type = other DNA
  modified_base 1..3: mod_base = OTHER; note = 2'-O-methyl ribonucleotide
  modified_base 21..100: mod_base = OTHER; note = 2'-O-methyl ribonucleotide
  modified_base 1..4: mod_base = OTHER; note = phosphorothioate linkage
  modified_base 97..100: mod_base = OTHER; note = phosphorothioate linkage
  misc_feature 1..13: note = RNA
  misc_feature 14: note = DNA
  misc_feature 15..100: note = RNA

SEQ ID NO: 589 - RNA, 100 nt, synthetic construct
  source 1..100: mol_type = other RNA
  modified_base 1..3: mod_base = OTHER; note = 2'-O-methyl ribonucleotide
  modified_base 21..100: mod_base = OTHER; note = 2'-O-methyl ribonucleotide
  modified_base 1..4: mod_base = OTHER; note = phosphorothioate linkage
  modified_base 97..100: mod_base = OTHER; note = phosphorothioate linkage
  modified_base 10: mod_base = i
aagatacctnaataaccctcgttttagagctagaaatagcaagttaaaataaggctagtccgttatcaacttgaaaaagtggcaccgagtcggtgctttt

SEQ ID NO: 590 - RNA, 100 nt, synthetic construct; identical to SEQ ID NO: 566
  source 1..100: mol_type = other RNA
  modified_base 1..3: mod_base = OTHER; note = 2'-O-methyl ribonucleotide
  modified_base 21..100: mod_base = OTHER; note = 2'-O-methyl ribonucleotide
  modified_base 1..4: mod_base = OTHER; note = phosphorothioate linkage
  modified_base 97..100: mod_base = OTHER; note = phosphorothioate linkage
  modified_base 9: mod_base = OTHER; note = 2'-O-methyl-3'-phosphonoacetate-uridine

SEQ ID NO: 591 - RNA, 100 nt, synthetic construct; identical to SEQ ID NO: 562
  source 1..100: mol_type = other RNA
  modified_base 1..3: mod_base = OTHER; note = 2'-O-methyl ribonucleotide
  modified_base 21..100: mod_base = OTHER; note = 2'-O-methyl ribonucleotide
  modified_base 1..4: mod_base = OTHER; note = phosphorothioate linkage
  modified_base 97..100: mod_base = OTHER; note = phosphorothioate linkage
  modified_base 13: mod_base = OTHER; note = 2'-O-methyl-3'-phosphonoacetate-uridine

SEQ ID NO: 592 - RNA, 100 nt, synthetic construct; identical to SEQ ID NO: 571
  source 1..100: mol_type = other RNA
  modified_base 1..3: mod_base = OTHER; note = 2'-O-methyl ribonucleotide
  modified_base 21..100: mod_base = OTHER; note = 2'-O-methyl ribonucleotide
  modified_base 1..4: mod_base = OTHER; note = phosphorothioate linkage
  modified_base 97..100: mod_base = OTHER; note = phosphorothioate linkage
  modified_base 9: mod_base = OTHER; note = 2'-O-methyl-3'-phosphonoacetate-uridine
  modified_base 13: mod_base = OTHER; note = 2'-O-methyl-3'-phosphonoacetate-uridine

SEQ ID NO: 593 - RNA, 100 nt, synthetic construct
  source 1..100: mol_type = other RNA
  modified_base 1..3: mod_base = OTHER; note = 2'-O-methyl ribonucleotide
  modified_base 21: mod_base = OTHER; note = 2'-O-methyl ribonucleotide
  modified_base 28..32: mod_base = OTHER; note = 2'-O-methyl ribonucleotide
  modified_base 34..42: mod_base = OTHER; note = 2'-O-methyl ribonucleotide
  modified_base 46: mod_base = OTHER; note = 2'-O-methyl ribonucleotide
  modified_base 48: mod_base = OTHER; note = 2'-O-methyl ribonucleotide
  modified_base 50: mod_base = OTHER; note = 2'-O-methyl ribonucleotide
  modified_base 52..57: mod_base = OTHER; note = 2'-O-methyl ribonucleotide
  modified_base 60..61: mod_base = OTHER; note = 2'-O-methyl ribonucleotide
  modified_base 66..67: mod_base = OTHER; note = 2'-O-methyl ribonucleotide
  modified_base 70..72: mod_base = OTHER; note = 2'-O-methyl ribonucleotide
  modified_base 74..81: mod_base = OTHER; note = 2'-O-methyl ribonucleotide
  modified_base 83..100: mod_base = OTHER; note = 2'-O-methyl ribonucleotide
  modified_base 1..4: mod_base = OTHER; note = phosphorothioate linkage
  modified_base 97..100: mod_base = OTHER; note = phosphorothioate linkage
  modified_base 3: mod_base = i
aanatacctgaataaccctcgttttagagctagaaatagcaagttaaaataaggctagtccgttatcaacttgaaaaagtggcaccgagtcggtgctttt

SEQ ID NO: 594 - RNA, 100 nt, synthetic construct
  source 1..100: mol_type = other RNA
  modified_base 1..3: mod_base = OTHER; note = 2'-O-methyl ribonucleotide
  modified_base 21: mod_base = OTHER; note = 2'-O-methyl ribonucleotide
  modified_base 28..32: mod_base = OTHER; note = 2'-O-methyl ribonucleotide
  modified_base 34..42: mod_base = OTHER; note = 2'-O-methyl ribonucleotide
  modified_base 46: mod_base = OTHER; note = 2'-O-methyl ribonucleotide
  modified_base 48: mod_base = OTHER; note = 2'-O-methyl ribonucleotide
  modified_base 50: mod_base = OTHER; note = 2'-O-methyl ribonucleotide
  modified_base 52..57: mod_base = OTHER; note = 2'-O-methyl ribonucleotide
  modified_base 60..61: mod_base = OTHER; note = 2'-O-methyl ribonucleotide
  modified_base 66..67: mod_base = OTHER; note = 2'-O-methyl ribonucleotide
  modified_base 70..72: mod_base = OTHER; note = 2'-O-methyl ribonucleotide
  modified_base 74..81: mod_base = OTHER; note = 2'-O-methyl ribonucleotide
  modified_base 83..100: mod_base = OTHER; note = 2'-O-methyl ribonucleotide
  modified_base 1..4: mod_base = OTHER; note = phosphorothioate linkage
  modified_base 97..100: mod_base = OTHER; note = phosphorothioate linkage
  modified_base 3: mod_base = i
  modified_base 10: mod_base = i
aanatacctnaataaccctcgttttagagctagaaatagcaagttaaaataaggctagtccgttatcaacttgaaaaagtggcaccgagtcggtgctttt

SEQ ID NO: 595 - DNA, 100 bp, synthetic construct; identical to SEQ ID NO: 72
  source 1..100: mol_type = other DNA
  modified_base 1..3: mod_base = OTHER; note = 2'-O-methyl ribonucleotide
  modified_base 21: mod_base = OTHER; note = 2'-O-methyl ribonucleotide
  modified_base 28..32: mod_base = OTHER; note = 2'-O-methyl ribonucleotide
  modified_base 34..42: mod_base = OTHER; note = 2'-O-methyl ribonucleotide
  modified_base 46: mod_base = OTHER; note = 2'-O-methyl ribonucleotide
  modified_base 48: mod_base = OTHER; note = 2'-O-methyl ribonucleotide
  modified_base 50: mod_base = OTHER; note = 2'-O-methyl ribonucleotide
  modified_base 52..57: mod_base = OTHER; note = 2'-O-methyl ribonucleotide
  modified_base 60..61: mod_base = OTHER; note = 2'-O-methyl ribonucleotide
  modified_base 66..67: mod_base = OTHER; note = 2'-O-methyl ribonucleotide
  modified_base 70..72: mod_base = OTHER; note = 2'-O-methyl ribonucleotide
  modified_base 74..81: mod_base = OTHER; note = 2'-O-methyl ribonucleotide
  modified_base 83..100: mod_base = OTHER; note = 2'-O-methyl ribonucleotide
  modified_base 1..4: mod_base = OTHER; note = phosphorothioate linkage
  modified_base 97..100: mod_base = OTHER; note = phosphorothioate linkage
  misc_feature 1: note = RNA
  misc_feature 2: note = DNA
  misc_feature 3: note = RNA
  misc_feature 4..8: note = DNA
  misc_feature 9..10: note = RNA
  misc_feature 11..12: note = DNA
  misc_feature 13..100: note = RNA

SEQ ID NO: 596 - DNA, 100 bp, synthetic construct; identical to SEQ ID NO: 72
  source 1..100: mol_type = other DNA
  modified_base 1..3: mod_base = OTHER; note = 2'-O-methyl ribonucleotide
  modified_base 21: mod_base = OTHER; note = 2'-O-methyl ribonucleotide
  modified_base 28..32: mod_base = OTHER; note = 2'-O-methyl ribonucleotide
  modified_base 34..42: mod_base = OTHER; note = 2'-O-methyl ribonucleotide
  modified_base 46: mod_base = OTHER; note = 2'-O-methyl ribonucleotide
  modified_base 48: mod_base = OTHER; note = 2'-O-methyl ribonucleotide
  modified_base 50: mod_base = OTHER; note = 2'-O-methyl ribonucleotide
  modified_base 52..57: mod_base = OTHER; note = 2'-O-methyl ribonucleotide
  modified_base 60..61: mod_base = OTHER; note = 2'-O-methyl ribonucleotide
  modified_base 66..67: mod_base = OTHER; note = 2'-O-methyl ribonucleotide
  modified_base 70..72: mod_base = OTHER; note = 2'-O-methyl ribonucleotide
  modified_base 74..81: mod_base = OTHER; note = 2'-O-methyl ribonucleotide
  modified_base 83..100: mod_base = OTHER; note = 2'-O-methyl ribonucleotide
  modified_base 1..4: mod_base = OTHER; note = phosphorothioate linkage
  modified_base 97..100: mod_base = OTHER; note = phosphorothioate linkage
  misc_feature 1..2: note = DNA
  misc_feature 3..4: note = RNA
  misc_feature 5..11: note = DNA
  misc_feature 12..13: note = RNA
  misc_feature 14: note = DNA
  misc_feature 15..16: note = RNA
  misc_feature 17: note = DNA
  misc_feature 18..100: note = RNA

SEQ ID NO: 597 - DNA, 100 bp, synthetic construct; identical to SEQ ID NO: 72
  source 1..100: mol_type = other DNA
  modified_base 1..3: mod_base = OTHER; note = 2'-O-methyl ribonucleotide
  modified_base 21: mod_base = OTHER; note = 2'-O-methyl ribonucleotide
  modified_base 28..32: mod_base = OTHER; note = 2'-O-methyl ribonucleotide
  modified_base 34..42: mod_base = OTHER; note = 2'-O-methyl ribonucleotide
  modified_base 46: mod_base = OTHER; note = 2'-O-methyl ribonucleotide
  modified_base 48: mod_base = OTHER; note = 2'-O-methyl ribonucleotide
  modified_base 50: mod_base = OTHER; note = 2'-O-methyl ribonucleotide
  modified_base 52..57: mod_base = OTHER; note = 2'-O-methyl ribonucleotide
  modified_base 60..61: mod_base = OTHER; note = 2'-O-methyl ribonucleotide
  modified_base 66..67: mod_base = OTHER; note = 2'-O-methyl ribonucleotide
  modified_base 70..72: mod_base = OTHER; note = 2'-O-methyl ribonucleotide
  modified_base 74..81: mod_base = OTHER; note = 2'-O-methyl ribonucleotide
  modified_base 83..100: mod_base = OTHER; note = 2'-O-methyl ribonucleotide
  modified_base 1..4: mod_base = OTHER; note = phosphorothioate linkage
  modified_base 97..100: mod_base = OTHER; note = phosphorothioate linkage
  misc_feature 1..2: note = DNA
  misc_feature 3..4: note = RNA
  misc_feature 5..11: note = DNA
  misc_feature 12..13: note = RNA
  misc_feature 14: note = DNA
  misc_feature 15: note = RNA
  misc_feature 16..18: note = DNA
  misc_feature 19..100: note = RNA

SEQ ID NO: 598 - DNA, 100 bp, synthetic construct; identical to SEQ ID NO: 72
  source 1..100: mol_type = other DNA
  modified_base 1..3: mod_base = OTHER; note = 2'-O-methyl ribonucleotide
  modified_base 21: mod_base = OTHER; note = 2'-O-methyl ribonucleotide
  modified_base 28..32: mod_base = OTHER; note = 2'-O-methyl ribonucleotide
  modified_base 34..42: mod_base = OTHER; note = 2'-O-methyl ribonucleotide
  modified_base 46: mod_base = OTHER; note = 2'-O-methyl ribonucleotide
  modified_base 48: mod_base = OTHER; note = 2'-O-methyl ribonucleotide
  modified_base 50: mod_base = OTHER; note = 2'-O-methyl ribonucleotide
  modified_base 52..57: mod_base = OTHER; note = 2'-O-methyl ribonucleotide
  modified_base 60..61: mod_base = OTHER; note = 2'-O-methyl ribonucleotide
  modified_base 66..67: mod_base = OTHER; note = 2'-O-methyl ribonucleotide
  modified_base 70..72: mod_base = OTHER; note = 2'-O-methyl ribonucleotide
  modified_base 74..81: mod_base = OTHER; note = 2'-O-methyl ribonucleotide
  modified_base 83..100: mod_base = OTHER; note = 2'-O-methyl ribonucleotide
  modified_base 1..4: mod_base = OTHER; note = phosphorothioate linkage
  modified_base 97..100: mod_base = OTHER; note = phosphorothioate linkage
  misc_feature 1..2: note = RNA
  misc_feature 3..8: note = DNA
  misc_feature 9..100: note = RNA

SEQ ID NO: 599 - DNA, 100 bp, synthetic construct; identical to SEQ ID NO: 72
  source 1..100: mol_type = other DNA
  modified_base 1..3: mod_base = OTHER; note = 2'-O-methyl ribonucleotide
  modified_base 21: mod_base = OTHER; note = 2'-O-methyl ribonucleotide
  modified_base 28..32: mod_base = OTHER; note = 2'-O-methyl ribonucleotide
  modified_base 34..42: mod_base = OTHER; note = 2'-O-methyl ribonucleotide
  modified_base 46: mod_base = OTHER; note = 2'-O-methyl ribonucleotide
  modified_base 48: mod_base = OTHER; note = 2'-O-methyl ribonucleotide
  modified_base 50: mod_base = OTHER; note = 2'-O-methyl ribonucleotide
  modified_base 52..57: mod_base = OTHER; note = 2'-O-methyl ribonucleotide
  modified_base 60..61: mod_base = OTHER; note = 2'-O-methyl ribonucleotide
  modified_base 66..67: mod_base = OTHER; note = 2'-O-methyl ribonucleotide
  modified_base 70..72: mod_base = OTHER; note = 2'-O-methyl ribonucleotide
  modified_base 74..81: mod_base = OTHER; note = 2'-O-methyl ribonucleotide
  modified_base 83..100: mod_base = OTHER; note = 2'-O-methyl ribonucleotide
  modified_base 1..4: mod_base = OTHER; note = phosphorothioate linkage
  modified_base 97..100: mod_base = OTHER; note = phosphorothioate linkage
  misc_feature 1: note = RNA
  misc_feature 2: note = DNA
  misc_feature 3..4: note = RNA
  misc_feature 5..11: note = DNA
  misc_feature 12..13: note = RNA
  misc_feature 14: note = DNA
  misc_feature 15: note = RNA
  misc_feature 16..18: note = DNA
  misc_feature 19..100: note = RNA

SEQ ID NO: 600 - RNA, 100 nt, synthetic construct
  source 1..100: mol_type = other RNA
  modified_base 1..3: mod_base = OTHER; note = 2'-O-methyl ribonucleotide
  modified_base 21: mod_base = OTHER; note = 2'-O-methyl ribonucleotide
  modified_base 28..32: mod_base = OTHER; note = 2'-O-methyl ribonucleotide
  modified_base 34..42: mod_base = OTHER; note = 2'-O-methyl ribonucleotide
  modified_base 46: mod_base = OTHER; note = 2'-O-methyl ribonucleotide
  modified_base 48: mod_base = OTHER; note = 2'-O-methyl ribonucleotide
  modified_base 50: mod_base = OTHER; note = 2'-O-methyl ribonucleotide
  modified_base 52..57: mod_base = OTHER; note = 2'-O-methyl ribonucleotide
  modified_base 60..61: mod_base = OTHER; note = 2'-O-methyl ribonucleotide
  modified_base 66..67: mod_base = OTHER; note = 2'-O-methyl ribonucleotide
  modified_base 70..72: mod_base = OTHER; note = 2'-O-methyl ribonucleotide
  modified_base 74..81: mod_base = OTHER; note = 2'-O-methyl ribonucleotide
  modified_base 83..100: mod_base = OTHER; note = 2'-O-methyl ribonucleotide
  modified_base 1..4: mod_base = OTHER; note = phosphorothioate linkage
  modified_base 97..100: mod_base = OTHER; note = phosphorothioate linkage
  misc_difference 13: note = zebularine or 4-deoxyuridine / 4-deazacytidine
  misc_difference 17: note = zebularine or 4-deoxyuridine / 4-deazacytidine
aagatacctgaanaacnctcgttttagagctagaaatagcaagttaaaataaggctagtccgttatcaacttgaaaaagtggcaccgagtcggtgctttt

SEQ ID NO: 601 - DNA, 100 bp, synthetic construct; identical to SEQ ID NO: 72
  source 1..100: mol_type = other DNA
  modified_base 1: mod_base = OTHER; note = 2'-O-methyl ribonucleotide
  modified_base 3..4: mod_base = OTHER; note = 2'-O-methyl ribonucleotide
  modified_base 98..100: mod_base = OTHER; note = 2'-O-methyl ribonucleotide
  modified_base 1..4: mod_base = OTHER; note = phosphorothioate linkage
  modified_base 97..100: mod_base = OTHER; note = phosphorothioate linkage
  misc_feature 1: note = RNA
  misc_feature 2: note = DNA
  misc_feature 3..4: note = RNA
  misc_feature 5..11: note = DNA
  misc_feature 12..13: note = RNA
  misc_feature 14: note = DNA
  misc_feature 15: note = RNA
  misc_feature 16..18: note = DNA
  misc_feature 19..100: note = RNA

SEQ ID NO: 602 - DNA, 100 bp, synthetic construct; identical to SEQ ID NO: 72
  source 1..100: mol_type = other DNA
  modified_base 1..2: mod_base = OTHER; note = 2'-O-methyl ribonucleotide
  modified_base 98..100: mod_base = OTHER; note = 2'-O-methyl ribonucleotide
  modified_base 1..4: mod_base = OTHER; note = phosphorothioate linkage
  modified_base 97..100: mod_base = OTHER; note = phosphorothioate linkage
  misc_feature 1..2: note = RNA
  misc_feature 3..10: note = DNA
  misc_feature 11: note = RNA
  misc_feature 12: note = DNA
  misc_feature 13: note = RNA
  misc_feature 14: note = DNA
  misc_feature 15: note = RNA
  misc_feature 16: note = DNA
  misc_feature 17: note = RNA
  misc_feature 18: note = DNA
  misc_feature 19: note = RNA
  misc_feature 20: note = DNA
  misc_feature 21..100: note = RNA

SEQ ID NO: 603 - DNA, 100 bp, synthetic construct; identical to SEQ ID NO: 72
  source 1..100: mol_type = other DNA
  modified_base 1..2: mod_base = OTHER; note = 2'-O-methyl ribonucleotide
  modified_base 98..100: mod_base = OTHER; note = 2'-O-methyl ribonucleotide
  modified_base 1..4: mod_base = OTHER; note = phosphorothioate linkage
  modified_base 97..100: mod_base = OTHER; note = phosphorothioate linkage
  misc_feature 1..2: note = RNA
  misc_feature 3..6: note = DNA
  misc_feature 7: note = RNA
  misc_feature 8: note = DNA
  misc_feature 9: note = RNA
  misc_feature 10: note = DNA
  misc_feature 11: note = RNA
  misc_feature 12: note = DNA
  misc_feature 13: note = RNA
  misc_feature 14: note = DNA
  misc_feature 15: note = RNA
  misc_feature 16: note = DNA
  misc_feature 17: note = RNA
  misc_feature 18: note = DNA
  misc_feature 19: note = RNA
  misc_feature 20: note = DNA
  misc_feature 21..100: note = RNA

SEQ ID NO: 604 - DNA, 100 bp, synthetic construct; identical to SEQ ID NO: 72
  source 1..100: mol_type = other DNA
  modified_base 1: mod_base = OTHER; note = 2'-O-methyl ribonucleotide
  modified_base 98..100: mod_base = OTHER; note = 2'-O-methyl ribonucleotide
  modified_base 1..4: mod_base = OTHER; note = phosphorothioate linkage
  modified_base 97..100: mod_base = OTHER; note = phosphorothioate linkage
  misc_feature 1: note = RNA
  misc_feature 2..10: note = DNA
  misc_feature 11..100: note = RNA

SEQ ID NO: 605 - DNA, 100 bp, synthetic construct; identical to SEQ ID NO: 72
  source 1..100: mol_type = other DNA
  modified_base 98..100: mod_base = OTHER; note = 2'-O-methyl ribonucleotide
  modified_base 1..4: mod_base = OTHER; note = phosphorothioate linkage
  modified_base 97..100: mod_base = OTHER; note = phosphorothioate linkage
  misc_feature 1..6: note = DNA
  misc_feature 7: note = RNA
  misc_feature 8..11: note = DNA
  misc_feature 12..100: note = RNA

SEQ ID NO: 606 - DNA, 100 bp, synthetic construct; identical to SEQ ID NO: 72
  source 1..100: mol_type = other DNA
  modified_base 1..3: mod_base = OTHER; note = 2'-O-methyl ribonucleotide
  modified_base 98..100: mod_base = OTHER; note = 2'-O-methyl ribonucleotide
  modified_base 1..4: mod_base = OTHER; note = phosphorothioate linkage
  modified_base 97..100: mod_base = OTHER; note = phosphorothioate linkage
  misc_feature 1..6: note = RNA
  misc_feature 7: note = DNA
  misc_feature 8: note = RNA
  misc_feature 9: note = DNA
  misc_feature 10..12: note = RNA
  misc_feature 13: note = DNA
  misc_feature 14..100: note = RNA

SEQ ID NO: 607 - DNA, 100 bp, synthetic construct; identical to SEQ ID NO: 72
  source 1..100: mol_type = other DNA
  modified_base 1: mod_base = OTHER; note = 2'-O-methyl ribonucleotide
  modified_base 98..100: mod_base = OTHER; note = 2'-O-methyl ribonucleotide
  modified_base 1..4: mod_base = OTHER; note = phosphorothioate linkage
  modified_base 97..100: mod_base = OTHER; note = phosphorothioate linkage
  misc_feature 1: note = RNA
  misc_feature 2..10: note = DNA
  misc_feature 11: note = RNA
  misc_feature 12: note = DNA
  misc_feature 13: note = RNA
  misc_feature 14: note = DNA
  misc_feature 15: note = RNA
  misc_feature 16: note = DNA
  misc_feature 17: note = RNA
  misc_feature 18: note = DNA
  misc_feature 19: note = RNA
  misc_feature 20: note = DNA
  misc_feature 21..100: note = RNA

SEQ ID NO: 608 - DNA, 100 bp, synthetic construct; identical to SEQ ID NO: 72
  source 1..100: mol_type = other DNA
  modified_base 1..2: mod_base = OTHER; note = 2'-O-methyl ribonucleotide
  modified_base 98..100: mod_base = OTHER; note = 2'-O-methyl ribonucleotide
  modified_base 1..4: mod_base = OTHER; note = phosphorothioate linkage
  modified_base 97..100: mod_base = OTHER; note = phosphorothioate linkage
  misc_feature 1..2: note = RNA
  misc_feature 3..7: note = DNA
  misc_feature 8..100: note = RNA

SEQ ID NO: 609 - DNA, 100 bp, synthetic construct; identical to SEQ ID NO: 72
  source 1..100: mol_type = other DNA
  modified_base 3..4: mod_base = OTHER; note = 2'-O-methyl ribonucleotide
  modified_base 98..100: mod_base = OTHER; note = 2'-O-methyl ribonucleotide
  modified_base 1..4: mod_base = OTHER; note = phosphorothioate linkage
  modified_base 97..100: mod_base = OTHER; note = phosphorothioate linkage
  misc_feature 1..2: note = DNA
  misc_feature 3..4: note = RNA
  misc_feature 5..11: note = DNA
  misc_feature 12..13: note = RNA
  misc_feature 14: note = DNA
  misc_feature 15: note = RNA
  misc_feature 16..18: note = DNA
  misc_feature 19..100: note = RNA

SEQ ID NO: 610 - DNA, 100 bp, synthetic construct; identical to SEQ ID NO: 72
  source 1..100: mol_type = other DNA
  modified_base 1..2: mod_base = OTHER; note = 2'-O-methyl ribonucleotide
  modified_base 98..100: mod_base = OTHER; note = 2'-O-methyl ribonucleotide
  modified_base 1..4: mod_base = OTHER; note = phosphorothioate linkage
  modified_base 97..100: mod_base = OTHER; note = phosphorothioate linkage
  misc_feature 1..2: note = RNA
  misc_feature 3..8: note = DNA
  misc_feature 9..100: note = RNA

SEQ ID NO: 611 - DNA, 100 bp, synthetic construct; identical to SEQ ID NO: 72
  source 1..100: mol_type = other DNA
  modified_base 1..3: mod_base = OTHER; note = 2'-O-methyl ribonucleotide
  modified_base 98..100: mod_base = OTHER; note = 2'-O-methyl ribonucleotide
  modified_base 1..4: mod_base = OTHER; note = phosphorothioate linkage
  modified_base 97..100: mod_base = OTHER; note = phosphorothioate linkage
  misc_feature 1..4: note = RNA
  misc_feature 5: note = DNA
  misc_feature 6: note = RNA
  misc_feature 7: note = DNA
  misc_feature 8: note = RNA
  misc_feature 9: note = DNA
  misc_feature 10: note = RNA
  misc_feature 11: note = DNA
  misc_feature 12: note = RNA
  misc_feature 13: note = DNA
  misc_feature 14: note = RNA
  misc_feature 15: note = DNA
  misc_feature 16: note = RNA
  misc_feature 17: note = DNA
  misc_feature 18: note = RNA
  misc_feature 19: note = DNA
  misc_feature 20..100: note = RNA

SEQ ID NO: 612 - DNA, 100 bp, synthetic construct; identical to SEQ ID NO: 72
  source 1..100: mol_type = other DNA
  modified_base 1..2: mod_base = OTHER; note = 2'-O-methyl ribonucleotide
  modified_base 98..100: mod_base = OTHER; note = 2'-O-methyl ribonucleotide
  modified_base 1..4: mod_base = OTHER; note = phosphorothioate linkage
  modified_base 97..100: mod_base = OTHER; note = phosphorothioate linkage
  misc_feature 1..2: note = RNA
  misc_feature 3..9: note = DNA
  misc_feature 10..100: note = RNA

SEQ ID NO: 613 - DNA, 100 bp, synthetic construct; identical to SEQ ID NO: 72
  source 1..100: mol_type = other DNA
  modified_base 1..3: mod_base = OTHER; note = 2'-O-methyl ribonucleotide
  modified_base 98..100: mod_base = OTHER; note = 2'-O-methyl ribonucleotide
  modified_base 1..4: mod_base = OTHER; note = phosphorothioate linkage
  modified_base 97..100: mod_base = OTHER; note = phosphorothioate linkage
  misc_feature 1..3: note = RNA
  misc_feature 4..10: note = DNA
  misc_feature 11..100: note = RNA

SEQ ID NO: 614 - DNA, 100 bp, synthetic construct; identical to SEQ ID NO: 72
  source 1..100: mol_type = other DNA
  modified_base 1..2: mod_base = OTHER; note = 2'-O-methyl ribonucleotide
  modified_base 98..100: mod_base = OTHER; note = 2'-O-methyl ribonucleotide
  modified_base 1..4: mod_base = OTHER; note = phosphorothioate linkage
  modified_base 97..100: mod_base = OTHER; note = phosphorothioate linkage
  misc_feature 1..2: note = RNA
  misc_feature 3..10: note = DNA
  misc_feature 11..100: note = RNA

SEQ ID NO: 615 - DNA, 100 bp, synthetic construct; identical to SEQ ID NO: 72
  source 1..100: mol_type = other DNA
  modified_base 1..3: mod_base = OTHER; note = 2'-O-methyl ribonucleotide
  modified_base 98..100: mod_base = OTHER; note = 2'-O-methyl ribonucleotide
  modified_base 1..4: mod_base = OTHER; note = phosphorothioate linkage
  modified_base 97..100: mod_base = OTHER; note = phosphorothioate linkage
  misc_feature 1..5: note = RNA
  misc_feature 6: note = DNA
  misc_feature 7..15: note = RNA
  misc_feature 16: note = DNA
  misc_feature 17..100: note = RNA

SEQ ID NO: 616 - DNA, 100 bp, synthetic construct; identical to SEQ ID NO: 72
  source 1..100: mol_type = other DNA
  modified_base 1..3: mod_base = OTHER; note = 2'-O-methyl ribonucleotide
  modified_base 98..100: mod_base = OTHER; note = 2'-O-methyl ribonucleotide
  modified_base 1..4: mod_base = OTHER; note = phosphorothioate linkage
  modified_base 97..100: mod_base = OTHER; note = phosphorothioate linkage
  misc_feature 1..9: note = RNA
  misc_feature 10: note = DNA
  misc_feature 11..12: note = RNA
  misc_feature 13: note = DNA
  misc_feature 14..17: note = RNA
  misc_feature 18: note = DNA
  misc_feature 19..100: note = RNA

SEQ ID NO: 617 - DNA, 100 bp, synthetic construct; identical to SEQ ID NO: 72
  source 1..100: mol_type = other DNA
  modified_base 1..3: mod_base = OTHER; note = 2'-O-methyl ribonucleotide
  modified_base 98..100: mod_base = OTHER; note = 2'-O-methyl ribonucleotide
  modified_base 1..4: mod_base = OTHER; note = phosphorothioate linkage
  modified_base 97..100: mod_base = OTHER; note = phosphorothioate linkage
  misc_feature 1..3: note = RNA
  misc_feature 3..7: note = DNA
  misc_feature 8: note = RNA
  misc_feature 9..10: note = DNA
  misc_feature 11..12: note = RNA
  misc_feature 13..14: note = DNA
  misc_feature 15..100: note = RNA

SEQ ID NO: 618 - DNA, 100 bp, synthetic construct; identical to SEQ ID NO: 72
  source 1..100: mol_type = other DNA
  modified_base 1..2: mod_base = OTHER; note = 2'-O-methyl ribonucleotide
  modified_base 98..100: mod_base = OTHER; note = 2'-O-methyl ribonucleotide
  modified_base 1..4: mod_base = OTHER; note = phosphorothioate linkage
  modified_base 97..100: mod_base = OTHER; note = phosphorothioate linkage
  misc_feature 1..2: note = RNA
  misc_feature 3..4: note = DNA
  misc_feature 5: note = RNA
  misc_feature 6..7: note = DNA
  misc_feature 8..100: note = RNA

SEQ ID NO: 619 - DNA, 100 bp, synthetic construct; identical to SEQ ID NO: 72
  source 1..100: mol_type = other DNA
  modified_base 1..2: mod_base = OTHER; note = 2'-O-methyl ribonucleotide
  modified_base 98..100: mod_base = OTHER; note = 2'-O-methyl ribonucleotide
  modified_base 1..4: mod_base = OTHER; note = phosphorothioate linkage
  modified_base 97..100: mod_base = OTHER; note = phosphorothioate linkage
  misc_feature 1..2: note = RNA
  misc_feature 3..4: note = DNA
  misc_feature 5: note = RNA
  misc_feature 6..8: note = DNA
  misc_feature 9..100: note = RNA

SEQ ID NO: 620 - DNA, 100 bp, synthetic construct; identical to SEQ ID NO: 72
  source 1..100: mol_type = other DNA
  modified_base 1..2: mod_base = OTHER; note = 2'-O-methyl ribonucleotide
  modified_base 98..100: mod_base = OTHER; note = 2'-O-methyl ribonucleotide
  modified_base 1..4: mod_base = OTHER; note = phosphorothioate linkage
  modified_base 97..100: mod_base = OTHER; note = phosphorothioate linkage
  misc_feature 1..2: note = RNA
  misc_feature 3..4: note = DNA
  misc_feature 5: note = RNA
  misc_feature 6..9: note = DNA
  misc_feature 10..100: note = RNA

SEQ ID NO: 621 - DNA, 100 bp, synthetic construct; identical to SEQ ID NO: 72
  source 1..100: mol_type = other DNA
  modified_base 1..2: mod_base = OTHER; note = 2'-O-methyl ribonucleotide
  modified_base 98..100: mod_base = OTHER; note = 2'-O-methyl ribonucleotide
  modified_base 1..4: mod_base = OTHER; note = phosphorothioate linkage
  modified_base 97..100: mod_base = OTHER; note = phosphorothioate linkage
  misc_feature 1..2: note = RNA
  misc_feature 3..4: note = DNA
  misc_feature 5: note = RNA
  misc_feature 6..10: note = DNA
  misc_feature 11..100: note = RNA

SEQ ID NO: 622 - DNA, 100 bp, synthetic construct; identical to SEQ ID NO: 72
  source 1..100: mol_type = other DNA
  modified_base 1..2: mod_base = OTHER; note = 2'-O-methyl ribonucleotide
  modified_base 98..100: mod_base = OTHER; note = 2'-O-methyl ribonucleotide
  modified_base 1..4: mod_base = OTHER; note = phosphorothioate linkage
  modified_base 97..100: mod_base = OTHER; note = phosphorothioate linkage
  misc_feature 1..2: note = RNA
  misc_feature 3..4: note = DNA
  misc_feature 5..6: note = RNA
  misc_feature 7..9: note = DNA
  misc_feature 10..100: note = RNA

SEQ ID NO: 623 - DNA, 100 bp, synthetic construct; identical to SEQ ID NO: 72
  source 1..100: mol_type = other DNA
  modified_base 1..2: mod_base = OTHER; note = 2'-O-methyl ribonucleotide
  modified_base 98..100: mod_base = OTHER; note = 2'-O-methyl ribonucleotide
  modified_base 1..4: mod_base = OTHER; note = phosphorothioate linkage
  modified_base 97..100: mod_base = OTHER; note = phosphorothioate linkage
  misc_feature 1..2: note = RNA
  misc_feature 3..4: note = DNA
  misc_feature 5..6: note = RNA
  misc_feature 7..10: note = DNA
  misc_feature 11..100: note = RNA

SEQ ID NO: 624 - DNA, 100 bp, synthetic construct; identical to SEQ ID NO: 72
  source 1..100: mol_type = other DNA
  modified_base 1..2: mod_base = OTHER; note = 2'-O-methyl ribonucleotide
  modified_base 98..100: mod_base = OTHER; note = 2'-O-methyl ribonucleotide
  modified_base 1..4: mod_base = OTHER; note = phosphorothioate linkage
  modified_base 97..100: mod_base = OTHER; note = phosphorothioate linkage
  misc_feature 1..2: note = RNA
  misc_feature 3: note = DNA
  misc_feature 4: note = RNA
  misc_feature 5: note = DNA
  misc_feature 6: note = RNA
  misc_feature 7: note = DNA
  misc_feature 8: note = RNA
  misc_feature 9: note = DNA
  misc_feature 10..100: note = RNA

SEQ ID NO: 625 - DNA, 100 bp, synthetic construct; identical to SEQ ID NO: 72
  source 1..100: mol_type = other DNA
  modified_base 1..3: mod_base = OTHER; note = 2'-O-methyl ribonucleotide
  modified_base 98..100: mod_base = OTHER; note = 2'-O-methyl ribonucleotide
  modified_base 1..4: mod_base = OTHER; note = phosphorothioate linkage
  modified_base 97..100: mod_base = OTHER; note = phosphorothioate linkage
  misc_feature 1..3: note = RNA
  misc_feature 4: note = DNA
  misc_feature 5: note = RNA
  misc_feature 6: note = DNA
  misc_feature 7: note = RNA
  misc_feature 8: note = DNA
  misc_feature 9: note = RNA
  misc_feature 10..100: note = DNA

SEQ ID NO: 626 - DNA, 100 bp, synthetic construct; identical to SEQ ID NO: 72
  source 1..100: mol_type = other DNA
  modified_base 1..3: mod_base = OTHER; note = 2'-O-methyl ribonucleotide
  modified_base 98..100: mod_base = OTHER; note = 2'-O-methyl ribonucleotide
  modified_base 1..4: mod_base = OTHER; note = phosphorothioate linkage
  modified_base 97..100: mod_base = OTHER; note = phosphorothioate linkage
  misc_feature 1..8: note = RNA
  misc_feature 9: note = DNA
  misc_feature 10..12: note = RNA
  misc_feature 13: note = DNA
  misc_feature 14..100: note = RNA

SEQ ID NO: 627 - DNA, 100 bp, synthetic construct; identical to SEQ ID NO: 72
  source 1..100: mol_type = other DNA
  modified_base 1..3: mod_base = OTHER; note = 2'-O-methyl ribonucleotide
  modified_base 98..100: mod_base = OTHER; note = 2'-O-methyl ribonucleotide
  modified_base 1..4: mod_base = OTHER; note = phosphorothioate linkage
  modified_base 97..100: mod_base = OTHER; note = phosphorothioate linkage
  misc_feature 1..3: note = RNA
  misc_feature 4: note = DNA
  misc_feature 5: note = RNA
  misc_feature 6: note = DNA
  misc_feature 7: note = RNA
  misc_feature 8: note = DNA
  misc_feature 9: note = RNA
  misc_feature 10: note = DNA
  misc_feature 11: note = RNA
  misc_feature 12: note = DNA
  misc_feature 13: note = RNA
  misc_feature 14: note = DNA
  misc_feature 15: note = RNA
  misc_feature 16: note = DNA
  misc_feature 17: note = RNA
  misc_feature 18: note = DNA
  misc_feature 19: note = RNA
  misc_feature 20: note = DNA
  misc_feature 21..100: note = RNA

SEQ ID NO: 628 - DNA, 100 bp, synthetic construct; identical to SEQ ID NO: 72
  source 1..100: mol_type = other DNA
  modified_base 1..3: mod_base = OTHER; note = 2'-O-methyl ribonucleotide
  modified_base 98..100: mod_base = OTHER; note = 2'-O-methyl ribonucleotide
  modified_base 1..4: mod_base = OTHER; note = phosphorothioate linkage
  modified_base 97..100: mod_base = OTHER; note = phosphorothioate linkage
  misc_feature 1..11: note = RNA
  misc_feature 12: note = DNA
  misc_feature 13: note = RNA
  misc_feature 14: note = DNA
  misc_feature 15..100: note = RNA

SEQ ID NO: 629 - DNA, 100 bp, synthetic construct; identical to SEQ ID NO: 72
  source 1..100: mol_type = other DNA
  modified_base 1..2: mod_base = OTHER; note = 2'-O-methyl ribonucleotide
  modified_base 98..100: mod_base = OTHER; note = 2'-O-methyl ribonucleotide
  modified_base 1..4: mod_base = OTHER; note = phosphorothioate linkage
  modified_base 97..100: mod_base = OTHER; note = phosphorothioate linkage
  misc_feature 1..2: note = RNA
  misc_feature 3: note = DNA
  misc_feature 4..6: note = RNA
  misc_feature 7: note = DNA
  misc_feature 8..11: note = RNA
  misc_feature 12: note = DNA
  misc_feature 13: note = RNA
  misc_feature 14: note = DNA
  misc_feature 15..100: note = RNA

SEQ ID NO: 630 - DNA, 100 bp, synthetic construct; identical to SEQ ID NO: 72
  source 1..100: mol_type = other DNA
  modified_base 98..100: mod_base = OTHER; note = 2'-O-methyl ribonucleotide
  modified_base 1..4: mod_base = OTHER; note = phosphorothioate linkage
  modified_base 97..100: mod_base = OTHER; note = phosphorothioate linkage
  misc_feature 1..10: note = DNA
  misc_feature 11..100: note = RNA

SEQ ID NO: 631 - DNA, 100 bp, synthetic construct; identical to SEQ ID NO: 72
  source 1..100: mol_type = other DNA
  modified_base 1..3: mod_base = OTHER; note = 2'-O-methyl ribonucleotide
  modified_base 98..100: mod_base = OTHER; note = 2'-O-methyl ribonucleotide
  modified_base 1..4: mod_base = OTHER; note = phosphorothioate linkage
  modified_base 97..100: mod_base = OTHER; note = phosphorothioate linkage
  misc_feature 1..3: note = RNA
  misc_feature 4..6: note = DNA
  misc_feature 7: note = RNA
  misc_feature 8..11: note = DNA
  misc_feature 12..100: note = RNA

SEQ ID NO: 632 - DNA, 100 bp, synthetic construct; identical to SEQ ID NO: 72
  source 1..100: mol_type = other DNA
  modified_base 1: mod_base = OTHER; note = 2'-O-methyl ribonucleotide
  modified_base 3: mod_base = OTHER; note = 2'-O-methyl ribonucleotide
  modified_base 98..100: mod_base = OTHER; note = 2'-O-methyl ribonucleotide
  modified_base 1..4: mod_base = OTHER; note = phosphorothioate linkage
  modified_base 97..100: mod_base = OTHER; note = phosphorothioate linkage
  misc_feature 1: note = RNA
  misc_feature 2: note = DNA
  misc_feature 3: note = RNA
  misc_feature 4..8: note = DNA
  misc_feature 9..10: note = RNA
  misc_feature 11..12: note = DNA
  misc_feature 13..100: note = RNA

SEQ ID NO: 633 - DNA, 100 bp, synthetic construct; identical to SEQ ID NO: 72
  source 1..100: mol_type = other DNA
  modified_base 1..2: mod_base = OTHER; note = 2'-O-methyl ribonucleotide
  modified_base 98..100: mod_base = OTHER; note = 2'-O-methyl ribonucleotide
  modified_base 1..4: mod_base = OTHER; note = phosphorothioate linkage
  modified_base 97..100: mod_base = OTHER; note = phosphorothioate linkage
  misc_feature 1..2: note = RNA
  misc_feature 3..6: note = DNA
  misc_feature 7: note = RNA
  misc_feature 8..11: note = DNA
  misc_feature 12..100: note = RNA

SEQ ID NO: 634 - DNA, 100 bp, synthetic construct; identical to SEQ ID NO: 72
  source 1..100: mol_type = other DNA
  modified_base 1..3: mod_base = OTHER; note = 2'-O-methyl ribonucleotide
  modified_base 98..100: mod_base = OTHER; note = 2'-O-methyl ribonucleotide
  modified_base 1..4: mod_base = OTHER; note = phosphorothioate linkage
  modified_base 97..100: mod_base = OTHER; note = phosphorothioate linkage
  misc_feature 1..3: note = RNA
  misc_feature 4..7: note = DNA
  misc_feature 8..11: note = RNA
  misc_feature 12..13: note = DNA
  misc_feature 14..19: note = RNA
  misc_feature 20: note = DNA
  misc_feature 21..100: note = RNA

SEQ ID NO: 635 - DNA, 100 bp, synthetic construct; identical to SEQ ID NO: 72
  source 1..100: mol_type = other DNA
  modified_base 2..3: mod_base = OTHER; note = 2'-O-methyl ribonucleotide
  modified_base 98..100: mod_base = OTHER; note = 2'-O-methyl ribonucleotide
  modified_base 1..4: mod_base = OTHER; note = phosphorothioate linkage
  modified_base 97..100: mod_base = OTHER; note = phosphorothioate linkage
  misc_feature 1: note = DNA
  misc_feature 2..3: note = RNA
  misc_feature 4..7: note = DNA
  misc_feature 8..11: note = RNA
  misc_feature 12..13: note = DNA
  misc_feature 14..19: note = RNA
  misc_feature 20: note = DNA
  misc_feature 21..100: note = RNA

SEQ ID NO: 636 - DNA, 100 bp, synthetic construct; identical to SEQ ID NO: 72
  source 1..100: mol_type = other DNA
  modified_base 2..3: mod_base = OTHER; note = 2'-O-methyl ribonucleotide
  modified_base 98..100: mod_base = OTHER; note = 2'-O-methyl ribonucleotide
  modified_base 1..4: mod_base = OTHER; note = phosphorothioate linkage
  modified_base 97..100: mod_base = OTHER; note = phosphorothioate linkage
  misc_feature 1: note = DNA
  misc_feature 2..3: note = RNA
  misc_feature 4..5: note = DNA
  misc_feature 6: note = RNA
  misc_feature 7..11: note = DNA
  misc_feature 12: note = RNA
  misc_feature 13: note = DNA
  misc_feature 14..16: note = RNA
  misc_feature 17: note = DNA
  misc_feature 18..100: note = RNA

SEQ ID NO: 637 - DNA, 100 bp, synthetic construct; identical to SEQ ID NO: 72
  source 1..100: mol_type = other DNA
  modified_base 1..3: mod_base = OTHER; note = 2'-O-methyl ribonucleotide
  modified_base 98..100: mod_base = OTHER; note = 2'-O-methyl ribonucleotide
  modified_base 1..4: mod_base = OTHER; note = phosphorothioate linkage
  modified_base 97..100: mod_base = OTHER; note = phosphorothioate linkage
  misc_feature 1..3: note = RNA
  misc_feature 4..5: note = DNA
  misc_feature 6: note = RNA
  misc_feature 7..11: note = DNA
  misc_feature 12: note = RNA
  misc_feature 13: note = DNA
  misc_feature 14..16: note = RNA
  misc_feature 17: note = DNA
  misc_feature 18..100: note = RNA

SEQ ID NO: 638 - DNA, 100 bp, synthetic construct; identical to SEQ ID NO: 72
  source 1..100: mol_type = other DNA
  modified_base 1..2: mod_base = OTHER; note = 2'-O-methyl ribonucleotide
  modified_base 98..100: mod_base = OTHER; note = 2'-O-methyl ribonucleotide
  modified_base 1..4: mod_base = OTHER; note = phosphorothioate linkage
  modified_base 97..100: mod_base = OTHER; note = phosphorothioate linkage
  misc_feature 1..2: note = RNA
  misc_feature 3..6: note = DNA
  misc_feature 7..100: note = RNA

SEQ ID NO: 639 - DNA, 100 bp, synthetic construct; identical to SEQ ID NO: 72
  source 1..100: mol_type = other DNA
  modified_base 1: mod_base = OTHER; note = 2'-O-methyl ribonucleotide
  modified_base 98..100: mod_base = OTHER; note = 2'-O-methyl ribonucleotide
  modified_base 1..4: mod_base = OTHER; note = phosphorothioate linkage
  modified_base 97..100: mod_base = OTHER; note = phosphorothioate linkage
  misc_feature 1: note = RNA
  misc_feature 2..6: note = DNA
  misc_feature 7: note = RNA
  misc_feature 8: note = DNA
  misc_feature 9: note = RNA
  misc_feature 10: note = DNA
  misc_feature 11: note = RNA
  misc_feature 12: note = DNA
  misc_feature 13: note = RNA
  misc_feature 14: note = DNA
  misc_feature 15: note = RNA
  misc_feature 16: note = DNA
  misc_feature 17: note = RNA
  misc_feature 18: note = DNA
  misc_feature 19: note = RNA
  misc_feature 20: note = DNA
  misc_feature 21..100: note = RNA

SEQ ID NO: 640 - DNA, 100 bp, synthetic construct; identical to SEQ ID NO: 72
  source 1..100: mol_type = other DNA
  modified_base 3..4: mod_base = OTHER; note = 2'-O-methyl ribonucleotide
  modified_base 98..100: mod_base = OTHER; note = 2'-O-methyl ribonucleotide
  modified_base 1..4: mod_base = OTHER; note = phosphorothioate linkage
  modified_base 97..100: mod_base = OTHER; note = phosphorothioate linkage
  misc_feature 1..2: note = DNA
  misc_feature 3..4: note = RNA
  misc_feature 5..11: note = DNA
  misc_feature 12..13: note = RNA
  misc_feature 14: note = DNA
  misc_feature 15: note = RNA
  misc_feature 16: note = DNA
  misc_feature 17: note = RNA
  misc_feature 18: note = RNA
  misc_feature 19..100: note = DNA

SEQ ID NO: 641 - DNA, 100 bp, synthetic construct; identical to SEQ ID NO: 72
  source 1..100: mol_type = other DNA
  modified_base 3..4: mod_base = OTHER; note = 2'-O-methyl ribonucleotide
  modified_base 98..100: mod_base = OTHER; note = 2'-O-methyl ribonucleotide
  modified_base 1..4: mod_base = OTHER; note = phosphorothioate linkage
  modified_base 97..100: mod_base = OTHER; note = phosphorothioate linkage
  misc_feature 1..2: note = DNA
  misc_feature 3..4: note = RNA
  misc_feature 5..11: note = DNA
  misc_feature 12..13: note = RNA
  misc_feature 14: note = DNA
  misc_feature 15..16: note = RNA
  misc_feature 17: note = DNA
  misc_feature 18..100: note = RNA

SEQ ID NO: 642 - RNA, 105 nt, synthetic construct
  source 1..105: mol_type = other RNA
  modified_base 1..7: mod_base = OTHER; note = 2'-O-methyl ribonucleotide
  modified_base 27: mod_base = OTHER; note = 2'-O-methyl ribonucleotide
  modified_base 37..38: mod_base = OTHER; note = 2'-O-methyl ribonucleotide
  modified_base 40..48: mod_base = OTHER; note = 2'-O-methyl ribonucleotide
  modified_base 52: mod_base = OTHER; note = 2'-O-methyl ribonucleotide
  modified_base 54: mod_base = OTHER; note = 2'-O-methyl ribonucleotide
  modified_base 56: mod_base = OTHER; note = 2'-O-methyl ribonucleotide
  modified_base 58..62: mod_base = OTHER; note = 2'-O-methyl ribonucleotide
  modified_base 65..66: mod_base = OTHER; note = 2'-O-methyl ribonucleotide
  modified_base 71..72: mod_base = OTHER; note = 2'-O-methyl ribonucleotide
  modified_base 75..77: mod_base = OTHER; note = 2'-O-methyl ribonucleotide
  modified_base 79..86: mod_base = OTHER; note = 2'-O-methyl ribonucleotide
  modified_base 88..105: mod_base = OTHER; note = 2'-O-methyl ribonucleotide
  modified_base 1..4: mod_base = OTHER; note = phosphorothioate linkage
  modified_base 102..105: mod_base = OTHER; note = phosphorothioate linkage
agaaaaagatacctgaataactctcgttttagagctagaaatagcaagttaaaataaggctagtccgttatcaacttgaaaaagtggcaccgagtcggtgctttt

SEQ ID NO: 643 - RNA, 107 nt, synthetic construct
  source 1..107: mol_type = other RNA
  modified_base 1..7: mod_base = OTHER; note = 2'-O-methyl ribonucleotide
  modified_base 27: mod_base = OTHER; note = 2'-O-methyl ribonucleotide
  modified_base 37..38: mod_base = OTHER; note = 2'-O-methyl ribonucleotide
  modified_base 40..48: mod_base = OTHER; note = 2'-O-methyl ribonucleotide
  modified_base 52: mod_base = OTHER; note = 2'-O-methyl ribonucleotide
  modified_base 54: mod_base = OTHER; note = 2'-O-methyl ribonucleotide
  modified_base 56: mod_base = OTHER; note = 2'-O-methyl ribonucleotide
  modified_base 58..62: mod_base = OTHER; note = 2'-O-methyl ribonucleotide
  modified_base 65..66: mod_base = OTHER; note = 2'-O-methyl ribonucleotide
  modified_base 71..72: mod_base = OTHER; note = 2'-O-methyl ribonucleotide
  modified_base 75..77: mod_base = OTHER; note = 2'-O-methyl ribonucleotide
  modified_base 79..86: mod_base = OTHER; note = 2'-O-methyl ribonucleotide
  modified_base 88..105: mod_base = OTHER; note = 2'-O-methyl ribonucleotide
  modified_base 1..4: mod_base = OTHER; note = phosphorothioate linkage
  modified_base 102..105: mod_base = OTHER; note = phosphorothioate linkage
tcagaaaaagatacctgaataactctcgttttagagctagaaatagcaagttaaaataaggctagtccgttatcaacttgaaaaagtggcaccgagtcggtgctttt

SEQ ID NO: 644 - DNA, 100 bp, synthetic construct; identical to SEQ ID NO: 72
  source 1..100: mol_type = other DNA
  modified_base 1..3: mod_base = OTHER; note = 2'-O-methyl ribonucleotide
  modified_base 21: mod_base = OTHER; note = 2'-O-methyl ribonucleotide
  modified_base 28..32: mod_base = OTHER; note = 2'-O-methyl ribonucleotide
  modified_base 34..42: mod_base = OTHER; note = 2'-O-methyl ribonucleotide
  modified_base 46: mod_base = OTHER; note = 2'-O-methyl ribonucleotide
  modified_base 48: mod_base = OTHER; note = 2'-O-methyl ribonucleotide
  modified_base 50: mod_base = OTHER; note = 2'-O-methyl ribonucleotide
  modified_base 52..57: mod_base = OTHER; note = 2'-O-methyl ribonucleotide
  modified_base 60..61: mod_base = OTHER; note = 2'-O-methyl ribonucleotide
  modified_base 66..67: mod_base = OTHER; note = 2'-O-methyl ribonucleotide
  modified_base 70..72: mod_base = OTHER; note = 2'-O-methyl ribonucleotide
  modified_base 74..81: mod_base = OTHER; note = 2'-O-methyl ribonucleotide
  modified_base 83..100: mod_base = OTHER; note = 2'-O-methyl ribonucleotide
  modified_base 1..4: mod_base = OTHER; note = phosphorothioate linkage
  modified_base 97..100: mod_base = OTHER; note = phosphorothioate linkage
  misc_feature 1..3: note = RNA
  misc_feature 4..7: note = DNA
  misc_feature 8: note = RNA
  misc_feature 9..10: note = DNA
  misc_feature 11..12: note = RNA
  misc_feature 13..14: note = DNA
  misc_feature 15..100: note = RNA

SEQ ID NO: 645 - RNA, 102 nt, synthetic construct
  source 1..102: mol_type = other RNA
ggaagatacctgaataaccctcgttttagagctagaaatagcaagttaaaataaggctagtccgttatcaacttgaaaaagtggcaccgagtcggtgctttt

SEQ ID NO: 646 - RNA, 101 nt, synthetic construct
  source 1..101: mol_type = other RNA
gaagatacctgaataaccctcgttttagagctagaaatagcaagttaaaataaggctagtccgttatcaacttgaaaaagtggcaccgagtcggtgctttt

SEQ ID NO: 647 - RNA, 100 nt, synthetic construct; identical to SEQ ID NO: 71
  source 1..100: mol_type = other RNA
  modified_base 1..3: mod_base = OTHER; note = 2'-O-methyl ribonucleotide
  modified_base 98..100: mod_base = OTHER; note = 2'-O-methyl ribonucleotide
  modified_base 1..4: mod_base = OTHER; note = phosphorothioate linkage
  modified_base 97..100: mod_base = OTHER; note = phosphorothioate linkage

SEQ ID NO: 648 - RNA, 103 nt, synthetic construct; identical to SEQ ID NO: 432
  source 1..103: mol_type = other RNA
  modified_base 1..3: mod_base = OTHER; note = 2'-O-methyl ribonucleotide
  modified_base 21: mod_base = OTHER; note = 2'-O-methyl ribonucleotide
  modified_base 28..32: mod_base = OTHER; note = 2'-O-methyl ribonucleotide
  modified_base 34..42: mod_base = OTHER; note = 2'-O-methyl ribonucleotide
  modified_base 46: mod_base = OTHER; note = 2'-O-methyl ribonucleotide
  modified_base 48: mod_base = OTHER; note = 2'-O-methyl ribonucleotide
  modified_base 50: mod_base = OTHER; note = 2'-O-methyl ribonucleotide
  modified_base 52..57: mod_base = OTHER; note = 2'-O-methyl ribonucleotide
  modified_base 60..61: mod_base = OTHER; note = 2'-O-methyl ribonucleotide
  modified_base 66..67: mod_base = OTHER; note = 2'-O-methyl ribonucleotide
  modified_base 70..72: mod_base = OTHER; note = 2'-O-methyl ribonucleotide
  modified_base 74..81: mod_base = OTHER; note = 2'-O-methyl ribonucleotide
  modified_base 83..100: mod_base = OTHER; note = 2'-O-methyl ribonucleotide
  modified_base 103: mod_base = OTHER; note = 2'-O-methyl ribonucleotide
  modified_base 1..4: mod_base = OTHER; note = phosphorothioate linkage
  modified_base 97..100: mod_base = OTHER; note = phosphorothioate linkage

SEQ ID NO: 649 - DNA, 100 bp, synthetic construct; identical to SEQ ID NO: 73
  source 1..100: mol_type = other DNA
  modified_base 1: mod_base = OTHER; note = 2'-O-methyl ribonucleotide
  modified_base 3..4: mod_base = OTHER; note = 2'-O-methyl ribonucleotide
  modified_base 21: mod_base = OTHER; note = 2'-O-methyl ribonucleotide
  modified_base 28..32: mod_base = OTHER; note = 2'-O-methyl ribonucleotide
  modified_base 34..42: mod_base = OTHER; note = 2'-O-methyl ribonucleotide
  modified_base 46: mod_base = OTHER; note = 2'-O-methyl ribonucleotide
  modified_base 48: mod_base = OTHER; note = 2'-O-methyl ribonucleotide
  modified_base 50: mod_base = OTHER; note = 2'-O-methyl ribonucleotide
  modified_base 52..57: mod_base = OTHER; note = 2'-O-methyl ribonucleotide
  modified_base 60..61: mod_base = OTHER; note = 2'-O-methyl ribonucleotide
  modified_base 66..67: mod_base = OTHER; note = 2'-O-methyl ribonucleotide
  modified_base 70..72: mod_base = OTHER; note = 2'-O-methyl ribonucleotide
  modified_base 74..81: mod_base = OTHER; note = 2'-O-methyl ribonucleotide
  modified_base 83..100: mod_base = OTHER; note = 2'-O-methyl ribonucleotide
  modified_base 1..4: mod_base = OTHER; note = phosphorothioate linkage
  modified_base 97..100: mod_base = OTHER; note = phosphorothioate linkage
  misc_feature 1: note = RNA
  misc_feature 2: note = DNA
  misc_feature 3..4: note = RNA
  misc_feature 5..11: note = DNA
  misc_feature 12..13: note = RNA
  misc_feature 14: note = DNA
  misc_feature 15: note = RNA
  misc_feature 16..18: note = DNA
  misc_feature 19..100: note = RNA

SEQ ID NO: 650 - DNA, 100 bp, synthetic construct; identical to SEQ ID NO: 73
  source 1..100: mol_type = other DNA
  modified_base 1..2: mod_base = OTHER; note = 2'-O-methyl ribonucleotide
  modified_base 21: mod_base = OTHER; note = 2'-O-methyl ribonucleotide
  modified_base 28..32: mod_base = OTHER; note = 2'-O-methyl ribonucleotide
  modified_base 34..42: mod_base = OTHER; note = 2'-O-methyl ribonucleotide
  modified_base 46: mod_base = OTHER; note = 2'-O-methyl ribonucleotide
  modified_base 48: mod_base = OTHER; note = 2'-O-methyl ribonucleotide
  modified_base 50: mod_base = OTHER; note = 2'-O-methyl ribonucleotide
  modified_base 52..57: mod_base = OTHER; note = 2'-O-methyl ribonucleotide
  modified_base 60..61: mod_base = OTHER; note = 2'-O-methyl ribonucleotide
  modified_base 66..67: mod_base = OTHER; note = 2'-O-methyl ribonucleotide
  modified_base 70..72: mod_base = OTHER; note = 2'-O-methyl ribonucleotide
  modified_base 74..81: mod_base = OTHER; note = 2'-O-methyl ribonucleotide
  modified_base 83..100: mod_base = OTHER; note = 2'-O-methyl ribonucleotide
  modified_base 1..4: mod_base = OTHER; note = phosphorothioate linkage
  modified_base 97..100: mod_base = OTHER; note = phosphorothioate linkage
  misc_feature 1..2: note = RNA
  misc_feature 3..10: note = DNA
  misc_feature 11: note = RNA
  misc_feature 12: note = DNA
  misc_feature 13: note = RNA
  misc_feature 14: note = DNA
  misc_feature 15: note = RNA
  misc_feature 16: note = DNA
  misc_feature 17: note = RNA
  misc_feature 18: note = DNA
  misc_feature 19: note = RNA
  misc_feature 20: note = DNA
  misc_feature 21..100: note = RNA

SEQ ID NO: 651 - DNA, 100 bp, synthetic construct; identical to SEQ ID NO: 73
  source 1..100: mol_type = other DNA
  modified_base 1..2: mod_base = OTHER; note = 2'-O-methyl ribonucleotide
  modified_base 21: mod_base = OTHER; note = 2'-O-methyl ribonucleotide
  modified_base 28..32: mod_base = OTHER; note = 2'-O-methyl ribonucleotide
  modified_base 34..42: mod_base = OTHER; note = 2'-O-methyl ribonucleotide
  modified_base 46: mod_base = OTHER; note = 2'-O-methyl ribonucleotide
  modified_base 48: mod_base = OTHER; note = 2'-O-methyl ribonucleotide
  modified_base 50: mod_base = OTHER; note = 2'-O-methyl ribonucleotide
  modified_base 52..57: mod_base = OTHER; note = 2'-O-methyl ribonucleotide
  modified_base 60..61: mod_base = OTHER; note = 2'-O-methyl ribonucleotide
  modified_base 66..67: mod_base = OTHER; note = 2'-O-methyl ribonucleotide
  modified_base 70..72: mod_base = OTHER; note = 2'-O-methyl ribonucleotide
  modified_base 74..81: mod_base = OTHER; note = 2'-O-methyl ribonucleotide
  modified_base 83..100: mod_base = OTHER; note = 2'-O-methyl ribonucleotide
  modified_base 1..4: mod_base = OTHER; note = phosphorothioate linkage
  modified_base 97..100: mod_base = OTHER; note = phosphorothioate linkage
  misc_feature 1..2: note = RNA
  misc_feature 3..6: note = DNA
  misc_feature 7: note = RNA
  misc_feature 8: note = DNA
  misc_feature 9: note = RNA
  misc_feature 10: note = DNA
  misc_feature 11: note = RNA
  misc_feature 12: note = DNA
  misc_feature 13: note = RNA
  misc_feature 14: note = DNA
  misc_feature 15: note = RNA
  misc_feature 16: note = DNA
  misc_feature 17: note = RNA
  misc_feature 18: note = DNA
  misc_feature 19: note = RNA
  misc_feature 20: note = DNA
  misc_feature 21: note = RNA

SEQ ID NO: 652 - DNA, 100 bp, synthetic construct; identical to SEQ ID NO: 73
  source 1..100: mol_type = other DNA
  modified_base 1: mod_base = OTHER; note = 2'-O-methyl ribonucleotide
  modified_base 21: mod_base = OTHER; note = 2'-O-methyl ribonucleotide
  modified_base 28..32: mod_base = OTHER; note = 2'-O-methyl ribonucleotide
  modified_base 34..42: mod_base = OTHER; note = 2'-O-methyl ribonucleotide
  modified_base 46: mod_base = OTHER; note = 2'-O-methyl ribonucleotide
  modified_base 48: mod_base = OTHER; note = 2'-O-methyl ribonucleotide
  modified_base 50: mod_base = OTHER; note = 2'-O-methyl ribonucleotide
  modified_base 52..57: mod_base = OTHER; note = 2'-O-methyl ribonucleotide
  modified_base 60..61: mod_base = OTHER; note = 2'-O-methyl ribonucleotide
  modified_base 66..67: mod_base = OTHER; note = 2'-O-methyl ribonucleotide
  modified_base 70..72: mod_base = OTHER; note = 2'-O-methyl ribonucleotide
  modified_base 74..81: mod_base = OTHER; note = 2'-O-methyl ribonucleotide
  modified_base 83..100: mod_base = OTHER; note = 2'-O-methyl ribonucleotide
  modified_base 1..4: mod_base = OTHER; note = phosphorothioate linkage
  modified_base 97..100: mod_base = OTHER; note = phosphorothioate linkage
  misc_feature 1: note = RNA
  misc_feature 2..10: note = DNA
  misc_feature 11..100: note = RNA

SEQ ID NO: 653 - DNA, 100 bp, synthetic construct; identical to SEQ ID NO: 73
  source 1..100: mol_type = other DNA
  modified_base 21: mod_base = OTHER; note = 2'-O-methyl ribonucleotide
  modified_base 28..32: mod_base = OTHER; note = 2'-O-methyl ribonucleotide
  modified_base 34..42: mod_base = OTHER; note = 2'-O-methyl ribonucleotide
  modified_base 46: mod_base = OTHER; note = 2'-O-methyl ribonucleotide
  modified_base 48: mod_base = OTHER; note = 2'-O-methyl ribonucleotide
  modified_base 50: mod_base = OTHER; note = 2'-O-methyl ribonucleotide
  modified_base 52..57: mod_base = OTHER; note = 2'-O-methyl ribonucleotide
  modified_base 60..61: mod_base = OTHER; note = 2'-O-methyl ribonucleotide
  modified_base 66..67: mod_base = OTHER; note = 2'-O-methyl ribonucleotide
  modified_base 70..72: mod_base = OTHER; note = 2'-O-methyl ribonucleotide
  modified_base 74..81: mod_base = OTHER; note = 2'-O-methyl ribonucleotide
  modified_base 83..100: mod_base = OTHER; note = 2'-O-methyl ribonucleotide
  modified_base 1..4: mod_base = OTHER; note = phosphorothioate linkage
  modified_base 97..100: mod_base = OTHER; note = phosphorothioate linkage
  misc_feature 1..6: note = DNA
  misc_feature 7: note = RNA
  misc_feature 8..11: note = DNA
  misc_feature 12..100: note = RNA

SEQ ID NO: 654 - DNA, 100 bp, synthetic construct; identical to SEQ ID NO: 73
  source 1..100: mol_type = other DNA
  modified_base 1..3: mod_base = OTHER; note = 2'-O-methyl ribonucleotide
  modified_base 21: mod_base = OTHER; note = 2'-O-methyl ribonucleotide
  modified_base 28..32: mod_base = OTHER; note = 2'-O-methyl ribonucleotide
  modified_base 34..42: mod_base = OTHER; note = 2'-O-methyl ribonucleotide
  modified_base 46: mod_base = OTHER; note = 2'-O-methyl ribonucleotide
  modified_base 48: mod_base = OTHER; note = 2'-O-methyl ribonucleotide
  modified_base 50: mod_base = OTHER; note = 2'-O-methyl ribonucleotide
  modified_base 52..57: mod_base = OTHER; note = 2'-O-methyl ribonucleotide
  modified_base 60..61: mod_base = OTHER; note = 2'-O-methyl ribonucleotide
  modified_base 66..67: mod_base = OTHER; note = 2'-O-methyl ribonucleotide
  modified_base 70..72: mod_base = OTHER; note = 2'-O-methyl ribonucleotide
  modified_base 74..81: mod_base = OTHER; note = 2'-O-methyl ribonucleotide
  modified_base 83..100: mod_base = OTHER; note = 2'-O-methyl ribonucleotide
  modified_base 1..4: mod_base = OTHER; note = phosphorothioate linkage
  modified_base 97..100: mod_base = OTHER; note = phosphorothioate linkage
  misc_feature 1..6: note = RNA
  misc_feature 7: note = DNA
  misc_feature 8: note = RNA
  misc_feature 9: note = DNA
  misc_feature 10..12: note = RNA
  misc_feature 13: note = DNA
  misc_feature 14..100: note = RNA

SEQ ID NO: 655 - DNA, 100 bp, synthetic construct; identical to SEQ ID NO: 73
  source 1..100: mol_type = other DNA
  modified_base 1: mod_base = OTHER; note = 2'-O-methyl ribonucleotide
  modified_base 21: mod_base = OTHER; note = 2'-O-methyl ribonucleotide
  modified_base 28..32: mod_base = OTHER; note = 2'-O-methyl ribonucleotide
  modified_base 34..42: mod_base = OTHER; note = 2'-O-methyl ribonucleotide
  modified_base 46: mod_base = OTHER; note = 2'-O-methyl ribonucleotide
  modified_base 48: mod_base = OTHER; note = 2'-O-methyl ribonucleotide
  modified_base 50: mod_base = OTHER; note = 2'-O-methyl ribonucleotide
  modified_base 52..57: mod_base = OTHER; note = 2'-O-methyl ribonucleotide
  modified_base 60..61: mod_base = OTHER; note = 2'-O-methyl ribonucleotide
  modified_base 66..67: mod_base = OTHER; note = 2'-O-methyl ribonucleotide
  modified_base 70..72: mod_base = OTHER; note = 2'-O-methyl ribonucleotide
  modified_base 74..81: mod_base = OTHER; note = 2'-O-methyl ribonucleotide
  modified_base 83..100: mod_base = OTHER; note = 2'-O-methyl ribonucleotide
  modified_base 1..4: mod_base = OTHER; note = phosphorothioate linkage
  modified_base 97..100: mod_base = OTHER; note = phosphorothioate linkage
  misc_feature 1: note = RNA
  misc_feature 2..10: note = DNA
  misc_feature 11: note = RNA
  misc_feature 12: note = DNA
  misc_feature 13: note = RNA
  misc_feature 14: note = DNA
  misc_feature 15: note = RNA
  misc_feature 16: note = DNA
  misc_feature 17: note = RNA
  misc_feature 18: note = DNA
  misc_feature 19: note = RNA
  misc_feature 20: note = DNA
  misc_feature 21..100: note = RNA

SEQ ID NO: 656 - RNA, 102 nt, synthetic construct
  source 1..102: mol_type = other RNA
ggaagatacctgaataactctcgttttagagctagaaatagcaagttaaaataaggctagtccgttatcaacttgaaaaagtggcaccgagtcggtgctttt

SEQ ID NO: 657 - RNA, 101 nt, synthetic construct
  source 1..101: mol_type = other RNA
gaagatacctgaataactctcgttttagagctagaaatagcaagttaaaataaggctagtccgttatcaacttgaaaaagtggcaccgagtcggtgctttt

SEQ ID NO: 658 - DNA, 100 bp, synthetic construct; identical to SEQ ID NO: 73
  source 1..100: mol_type = other DNA
  modified_base 1..3: mod_base = OTHER; note = 2'-O-methyl ribonucleotide
  modified_base 21: mod_base = OTHER; note = 2'-O-methyl ribonucleotide
  modified_base 28..32: mod_base = OTHER; note = 2'-O-methyl ribonucleotide
  modified_base 34..42: mod_base = OTHER; note = 2'-O-methyl ribonucleotide
  modified_base 46: mod_base = OTHER; note = 2'-O-methyl ribonucleotide
  modified_base 48: mod_base = OTHER; note = 2'-O-methyl ribonucleotide
  modified_base 50: mod_base = OTHER; note = 2'-O-methyl ribonucleotide
  modified_base 52..57: mod_base = OTHER; note = 2'-O-methyl ribonucleotide
  modified_base 60..61: mod_base = OTHER; note = 2'-O-methyl ribonucleotide
  modified_base 66..67: mod_base = OTHER; note = 2'-O-methyl ribonucleotide
  modified_base 70..72: mod_base = OTHER; note = 2'-O-methyl ribonucleotide
  modified_base 74..81: mod_base = OTHER; note = 2'-O-methyl ribonucleotide
  modified_base 83..100: mod_base = OTHER; note = 2'-O-methyl ribonucleotide
  modified_base 1..4: mod_base = OTHER; note = phosphorothioate linkage
  modified_base 97..100: mod_base = OTHER; note = phosphorothioate linkage
  misc_feature 1..3: note = RNA
  misc_feature 4..7: note = DNA
  misc_feature 8: note = RNA
  misc_feature 9..10: note = DNA
  misc_feature 11..12: note = RNA
  misc_feature 13..14: note = DNA
  misc_feature 15..100: note = RNA

SEQ ID NO: 659 - DNA, 100 bp, synthetic construct; identical to SEQ ID NO: 73
  source 1..100: mol_type = other DNA
  modified_base 1..2: mod_base = OTHER; note = 2'-O-methyl ribonucleotide
  modified_base 21: mod_base = OTHER; note = 2'-O-methyl ribonucleotide
  modified_base 28..32: mod_base = OTHER; note = 2'-O-methyl ribonucleotide
  modified_base 34..42: mod_base = OTHER; note = 2'-O-methyl ribonucleotide
  modified_base 46: mod_base = OTHER; note = 2'-O-methyl ribonucleotide
  modified_base 48: mod_base = OTHER; note = 2'-O-methyl ribonucleotide
  modified_base 50: mod_base = OTHER; note = 2'-O-methyl ribonucleotide
  modified_base 52..57: mod_base = OTHER; note = 2'-O-methyl ribonucleotide
  modified_base 60..61: mod_base = OTHER; note = 2'-O-methyl ribonucleotide
  modified_base 66..67: mod_base = OTHER; note = 2'-O-methyl ribonucleotide
  modified_base 70..72: mod_base = OTHER; note = 2'-O-methyl ribonucleotide
  modified_base 74..81: mod_base = OTHER; note = 2'-O-methyl ribonucleotide
  modified_base 83..100: mod_base = OTHER; note = 2'-O-methyl ribonucleotide
  modified_base 1..4: mod_base = OTHER; note = phosphorothioate linkage
  modified_base 97..100: mod_base = OTHER; note = phosphorothioate linkage
  misc_feature 1..2: note = RNA
  misc_feature 3..4: note = DNA
  misc_feature 5: note = RNA
  misc_feature 6..7: note = DNA
  misc_feature 8..100: note = RNA

SEQ ID NO: 660 - DNA, 100 bp, synthetic construct; identical to SEQ ID NO: 73
  source 1..100: mol_type = other DNA
  modified_base 1..2: mod_base = OTHER; note = 2'-O-methyl ribonucleotide
  modified_base 21: mod_base = OTHER; note = 2'-O-methyl ribonucleotide
  modified_base 28..32: mod_base = OTHER; note = 2'-O-methyl ribonucleotide
  modified_base 34..42: mod_base = OTHER; note = 2'-O-methyl ribonucleotide
  modified_base 46: mod_base = OTHER; note = 2'-O-methyl ribonucleotide
  modified_base 48: mod_base = OTHER; note = 2'-O-methyl ribonucleotide
  modified_base 50: mod_base = OTHER; note = 2'-O-methyl ribonucleotide
  modified_base 52..57: mod_base = OTHER; note = 2'-O-methyl ribonucleotide
  modified_base 60..61: mod_base = OTHER; note = 2'-O-methyl ribonucleotide
  modified_base 66..67: mod_base = OTHER; note = 2'-O-methyl ribonucleotide
  modified_base 70..72: mod_base = OTHER; note = 2'-O-methyl ribonucleotide
  modified_base 74..81: mod_base = OTHER; note = 2'-O-methyl ribonucleotide
  modified_base 83..100: mod_base = OTHER; note = 2'-O-methyl ribonucleotide
  modified_base 1..4: mod_base = OTHER; note = phosphorothioate linkage
  modified_base 97..100: mod_base = OTHER; note = phosphorothioate linkage
  misc_feature 1..2: note = RNA
  misc_feature 3..4: note = DNA
  misc_feature 5: note = RNA
  misc_feature 6..8: note = DNA
  misc_feature 9..100: note = RNA

SEQ ID NO: 661 - DNA, 100 bp, synthetic construct; identical to SEQ ID NO: 73
  source 1..100: mol_type = other DNA
  modified_base 1..2: mod_base = OTHER; note = 2'-O-methyl ribonucleotide
  modified_base 21: mod_base = OTHER; note = 2'-O-methyl ribonucleotide
  modified_base 28..32: mod_base = OTHER; note = 2'-O-methyl ribonucleotide
  modified_base 34..42: mod_base = OTHER; note = 2'-O-methyl ribonucleotide
  modified_base 46: mod_base = OTHER; note = 2'-O-methyl ribonucleotide
  modified_base 48: mod_base = OTHER; note = 2'-O-methyl ribonucleotide
  modified_base 50: mod_base = OTHER; note = 2'-O-methyl ribonucleotide
  modified_base 52..57: mod_base = OTHER; note = 2'-O-methyl ribonucleotide
  modified_base 60..61: mod_base = OTHER; note = 2'-O-methyl ribonucleotide
  modified_base 66..67: mod_base = OTHER; note = 2'-O-methyl ribonucleotide
  modified_base 70..72: mod_base = OTHER; note = 2'-O-methyl ribonucleotide
  modified_base 74..81: mod_base = OTHER; note = 2'-O-methyl ribonucleotide
  modified_base 83..100: mod_base = OTHER; note = 2'-O-methyl ribonucleotide
  modified_base 1..4: mod_base = OTHER; note = phosphorothioate linkage
  modified_base 97..100: mod_base = OTHER; note = phosphorothioate linkage
  misc_feature 1..2: note = RNA
  misc_feature 3..9: note = DNA
  misc_feature 10..100: note = RNA

SEQ ID NO: 662 - DNA, 100 bp, synthetic construct; identical to SEQ ID NO: 73
  source 1..100: mol_type = other DNA
  modified_base 1..2: mod_base = OTHER; note = 2'-O-methyl ribonucleotide
  modified_base 21: mod_base = OTHER; note = 2'-O-methyl ribonucleotide
  modified_base 28..32: mod_base = OTHER; note = 2'-O-methyl ribonucleotide
  modified_base 34..42: mod_base = OTHER; note = 2'-O-methyl ribonucleotide
  modified_base 46: mod_base = OTHER; note = 2'-O-methyl ribonucleotide
  modified_base 48: mod_base = OTHER; note = 2'-O-methyl ribonucleotide
  modified_base 50: mod_base = OTHER; note = 2'-O-methyl ribonucleotide
  modified_base 52..57: mod_base = OTHER; note = 2'-O-methyl ribonucleotide
  modified_base 60..61: mod_base = OTHER; note = 2'-O-methyl ribonucleotide
  modified_base 66..67: mod_base = OTHER; note = 2'-O-methyl ribonucleotide
  modified_base 70..72: mod_base = OTHER; note = 2'-O-methyl ribonucleotide
  modified_base 74..81: mod_base = OTHER; note = 2'-O-methyl ribonucleotide
  modified_base 83..100: mod_base = OTHER; note = 2'-O-methyl ribonucleotide
  modified_base 1..4: mod_base = OTHER; note = phosphorothioate linkage
  modified_base 97..100: mod_base = OTHER; note = phosphorothioate linkage
  misc_feature 1..2: note = RNA
  misc_feature 3..4: note = DNA
  misc_feature 5: note = RNA
  misc_feature 6..9: note = DNA
  misc_feature 10..100: note = RNA

SEQ ID NO: 663 - DNA, 100 bp, synthetic construct; identical to SEQ ID NO: 73
  source 1..100: mol_type = other DNA
  modified_base 1..3: mod_base = OTHER; note = 2'-O-methyl ribonucleotide
  modified_base 21: mod_base = OTHER; note = 2'-O-methyl ribonucleotide
  modified_base 28..32: mod_base = OTHER; note = 2'-O-methyl ribonucleotide
  modified_base 34..42: mod_base = OTHER; note = 2'-O-methyl ribonucleotide
  modified_base 46: mod_base = OTHER; note = 2'-O-methyl ribonucleotide
  modified_base 48: mod_base = OTHER; note = 2'-O-methyl ribonucleotide
  modified_base 50: mod_base = OTHER; note = 2'-O-methyl ribonucleotide
  modified_base 52..57: mod_base = OTHER; note = 2'-O-methyl ribonucleotide
  modified_base 60..61: mod_base = OTHER; note = 2'-O-methyl ribonucleotide
  modified_base 66..67: mod_base = OTHER; note = 2'-O-methyl ribonucleotide
  modified_base 70..72: mod_base = OTHER; note = 2'-O-methyl ribonucleotide
  modified_base 74..81: mod_base = OTHER; note = 2'-O-methyl ribonucleotide
  modified_base 83..100: mod_base = OTHER; note = 2'-O-methyl ribonucleotide
  modified_base 1..4: mod_base = OTHER; note = phosphorothioate linkage
  modified_base 97..100: mod_base = OTHER; note = phosphorothioate linkage
  misc_feature 1..4: note = RNA
  misc_feature 5: note = DNA
  misc_feature 6: note = RNA
  misc_feature 7: note = DNA
  misc_feature 8: note = RNA
  misc_feature 9: note = DNA
  misc_feature 10: note = RNA
  misc_feature 11: note = DNA
  misc_feature 12: note = RNA
  misc_feature 13: note = DNA
  misc_feature 14: note = RNA
  misc_feature 15: note = DNA
  misc_feature 16: note = RNA
  misc_feature 17: note = DNA
  misc_feature 18: note = RNA
  misc_feature 19: note = DNA
  misc_feature 20..100: note = RNA

SEQ ID NO: 664 - DNA, 100 bp, synthetic construct; identical to SEQ ID NO: 73
  source 1..100: mol_type = other DNA
  modified_base 1..2: mod_base = OTHER; note = 2'-O-methyl ribonucleotide
  modified_base 98..100: mod_base = OTHER; note = 2'-O-methyl ribonucleotide
  modified_base 1..4: mod_base = OTHER; note = phosphorothioate linkage
  modified_base 97..100: mod_base = OTHER; note = phosphorothioate linkage
  misc_feature 1..2: note = RNA
  misc_feature 3..7: note = DNA
  misc_feature 8..100: note = RNA

SEQ ID NO: 665 - DNA, 100 bp, synthetic construct; identical to SEQ ID NO: 73
  source 1..100: mol_type = other DNA
  modified_base 1..3: mod_base = OTHER; note = 2'-O-methyl ribonucleotide
  modified_base 98..100: mod_base = OTHER; note = 2'-O-methyl ribonucleotide
  modified_base 1..4: mod_base = OTHER; note = phosphorothioate linkage
  modified_base 97..100: mod_base = OTHER; note = phosphorothioate linkage
  misc_feature 1..9: note = RNA
  misc_feature 10: note = DNA
  misc_feature 11..12: note = RNA
  misc_feature 13: note = DNA
  misc_feature 14..17: note = RNA
  misc_feature 18: note = DNA
  misc_feature 19..100: note = RNA

SEQ ID NO: 666 - DNA, 100 bp, synthetic construct; identical to SEQ ID NO: 73
  source 1..100: mol_type = other DNA
  modified_base 1..3: mod_base = OTHER; note = 2'-O-methyl ribonucleotide
  modified_base 98..100: mod_base = OTHER; note = 2'-O-methyl ribonucleotide
  modified_base 1..4: mod_base = OTHER; note = phosphorothioate linkage
  modified_base 97..100: mod_base = OTHER; note = phosphorothioate linkage
  misc_feature 1..3: note = RNA
  misc_feature 4..7: note = DNA
  misc_feature 8: note = RNA
  misc_feature 9..10: note = DNA
  misc_feature 11..12: note = RNA
  misc_feature 13..14: note = DNA
  misc_feature 15..100: note = RNA

SEQ ID NO: 667 - DNA, 100 bp, synthetic construct; identical to SEQ ID NO: 73
  source 1..100: mol_type = other DNA
  modified_base 1..2: mod_base = OTHER; note = 2'-O-methyl ribonucleotide
  modified_base 98..100: mod_base = OTHER; note = 2'-O-methyl ribonucleotide
  modified_base 1..4: mod_base = OTHER; note = phosphorothioate linkage
  modified_base 97..100: mod_base = OTHER; note = phosphorothioate linkage
  misc_feature 1..2: note = RNA
  misc_feature 3..4: note = DNA
  misc_feature 5: note = RNA
  misc_feature 6..7: note = DNA
  misc_feature 8..100: note = RNA

SEQ ID NO: 668 - DNA, 100 bp, synthetic construct; identical to SEQ ID NO: 73
  source 1..100: mol_type = other DNA
  modified_base 1..2: mod_base = OTHER; note = 2'-O-methyl ribonucleotide
  modified_base 98..100: mod_base = OTHER; note = 2'-O-methyl ribonucleotide
  modified_base 1..4: mod_base = OTHER; note = phosphorothioate linkage
  modified_base 97..100: mod_base = OTHER; note = phosphorothioate linkage
  misc_feature 1..2: note = RNA
  misc_feature 3..4: note = DNA
  misc_feature 5: note = RNA
  misc_feature 6..8: note = DNA
  misc_feature 9..100: note = RNA

SEQ ID NO: 669 - DNA, 100 bp, synthetic construct; identical to SEQ ID NO: 73
  source 1..100: mol_type = other DNA
  modified_base 1..2: mod_base = OTHER; note = 2'-O-methyl ribonucleotide
  modified_base 98..100: mod_base = OTHER; note = 2'-O-methyl ribonucleotide
  modified_base 1..4: mod_base = OTHER; note = phosphorothioate linkage
  modified_base 97..100: mod_base = OTHER; note = phosphorothioate linkage
  misc_feature 1..2: note = RNA
  misc_feature 3..9: note = DNA
  misc_feature 10..100: note = RNA

SEQ ID NO: 670 - DNA, 100 bp, synthetic construct; identical to SEQ ID NO: 73
  source 1..100: mol_type = other DNA
  modified_base 1..2: mod_base = OTHER; note = 2'-O-methyl ribonucleotide
  modified_base 98..100: mod_base = OTHER; note = 2'-O-methyl ribonucleotide
  modified_base 1..4: mod_base = OTHER; note = phosphorothioate linkage
  modified_base 97..100: mod_base = OTHER; note = phosphorothioate linkage
  misc_feature 1..2: note = RNA
  misc_feature 3..4: note = DNA
  misc_feature 5: note = RNA
  misc_feature 6..9: note = DNA
  misc_feature 10..100: note = RNA

SEQ ID NO: 671 - DNA, 100 bp, synthetic construct; identical to SEQ ID NO: 73
  source 1..100: mol_type = other DNA
  modified_base 1: mod_base = OTHER; note = 2'-O-methyl ribonucleotide
  modified_base 3..4: mod_base = OTHER; note = 2'-O-methyl ribonucleotide
  modified_base 98..100: mod_base = OTHER; note = 2'-O-methyl ribonucleotide
  modified_base 1..4: mod_base = OTHER; note = phosphorothioate linkage
  modified_base 97..100: mod_base = OTHER; note = phosphorothioate linkage
  misc_feature 1: note = RNA
  misc_feature 2: note = DNA
  misc_feature 3..4: note = RNA
  misc_feature 5..11: note = DNA
  misc_feature 12..13: note = RNA
  misc_feature 14: note = DNA
  misc_feature 15: note = RNA
  misc_feature 16..18: note = DNA
  misc_feature 19..100: note = RNA

SEQ ID NO: 672 - DNA, 100 bp, synthetic construct; identical to SEQ ID NO: 73
  source 1..100: mol_type = other DNA
  modified_base 1..2: mod_base = OTHER; note = 2'-O-methyl ribonucleotide
  modified_base 98..100: mod_base = OTHER; note = 2'-O-methyl ribonucleotide
  modified_base 1..4: mod_base = OTHER; note = phosphorothioate linkage
  modified_base 97..100: mod_base = OTHER; note = phosphorothioate linkage
  misc_feature 1..2: note = RNA
  misc_feature 3..6: note = DNA
  misc_feature 7: note = RNA
  misc_feature 8: note = DNA
  misc_feature 9: note = RNA
  misc_feature 10: note = DNA
  misc_feature 11: note = RNA
  misc_feature 12: note = DNA
  misc_feature 13: note = RNA
  misc_feature 14: note = DNA
  misc_feature 15: note = RNA
  misc_feature 16: note = DNA
  misc_feature 17: note = RNA
  misc_feature 18: note = DNA
  misc_feature 19: note = RNA
  misc_feature 20: note = DNA
  misc_feature 21..100: note = RNA

SEQ ID NO: 673 - DNA, 100 bp, synthetic construct; identical to SEQ ID NO: 73
  source 1..100: mol_type = other DNA
  modified_base 1: mod_base = OTHER; note = 2'-O-methyl ribonucleotide
  modified_base 98..100: mod_base = OTHER; note = 2'-O-methyl ribonucleotide
  modified_base 1..4: mod_base = OTHER; note = phosphorothioate linkage
  modified_base 97..100: mod_base = OTHER; note = phosphorothioate linkage
  misc_feature 1: note = RNA
  misc_feature 2..10: note = DNA
  misc_feature 11..100: note = RNA

SEQ ID NO: 674 - DNA, 100 bp, synthetic construct; identical to SEQ ID NO: 73
  source 1..100: mol_type = other DNA
  modified_base 1..3: mod_base = OTHER; note = 2'-O-methyl ribonucleotide
  modified_base 98..100: mod_base = OTHER; note = 2'-O-methyl ribonucleotide
  modified_base 1..4: mod_base = OTHER; note = phosphorothioate linkage
  modified_base 97..100: mod_base = OTHER; note = phosphorothioate linkage
  misc_feature 1..6: note = RNA
  misc_feature 7: note = DNA
  misc_feature 8: note = RNA
  misc_feature 9: note = DNA
  misc_feature 10..12: note = RNA
  misc_feature 13: note = DNA
  misc_feature 14..100: note = RNA

SEQ ID NO: 675 - DNA, 100 bp, synthetic construct; identical to SEQ ID NO: 73
  source 1..100: mol_type = other DNA
  modified_base 3..4: mod_base = OTHER; note = 2'-O-methyl ribonucleotide
  modified_base 83..100: mod_base = OTHER; note = 2'-O-methyl ribonucleotide
  modified_base 1..4: mod_base = OTHER; note = phosphorothioate linkage
  modified_base 97..100: mod_base = OTHER; note = phosphorothioate linkage
  misc_feature 1..2: note = DNA
  misc_feature 3..4: note = RNA
  misc_feature 5..11: note = DNA
  misc_feature 12..13: note = RNA
  misc_feature 14: note = DNA
  misc_feature 15: note = RNA
  misc_feature 16..18: note = DNA
  misc_feature 19..100: note = RNA

SEQ ID NO: 676 - DNA, 100 bp, synthetic construct; identical to SEQ ID NO: 73
  source 1..100: mol_type = other DNA
  modified_base 1..3: mod_base = OTHER; note = 2'-O-methyl ribonucleotide
  modified_base 98..100: mod_base = OTHER; note = 2'-O-methyl ribonucleotide
  modified_base 1..4: mod_base = OTHER; note = phosphorothioate linkage
  modified_base 97..100: mod_base = OTHER; note = phosphorothioate linkage
  misc_feature 1..4: note = RNA
  misc_feature 5: note = DNA
  misc_feature 6: note = RNA
  misc_feature 7: note = DNA
  misc_feature 8: note = RNA
  misc_feature 9: note = DNA
  misc_feature 10: note = RNA
  misc_feature 11: note = DNA
  misc_feature 12: note = RNA
  misc_feature 13: note = DNA
  misc_feature 14: note = RNA
  misc_feature 15: note = DNA
  misc_feature 16: note = RNA
  misc_feature 17: note = DNA
  misc_feature 18: note = RNA
  misc_feature 19: note = DNA
  misc_feature 20..100: note = RNA

SEQ ID NO: 677 - DNA, 100 bp, synthetic construct; identical to SEQ ID NO: 73
  source 1..100: mol_type = other DNA
  modified_base 1..3: mod_base = OTHER; note = 2'-O-methyl ribonucleotide
  modified_base 98..100: mod_base = OTHER; note = 2'-O-methyl ribonucleotide
  modified_base 1..4: mod_base = OTHER; note = phosphorothioate linkage
  modified_base 97..100: mod_base = OTHER; note = phosphorothioate linkage
  misc_feature 1..3: note = RNA
  misc_feature 4..10: note = DNA
  misc_feature 11..100: note = RNA

SEQ ID NO: 678 - DNA, 100 bp, synthetic construct; identical to SEQ ID NO: 73
  source 1..100: mol_type = other DNA
  modified_base 1..2: mod_base = OTHER; note = 2'-O-methyl ribonucleotide
  modified_base 98..100: mod_base = OTHER; note = 2'-O-methyl ribonucleotide
  modified_base 1..4: mod_base = OTHER; note = phosphorothioate linkage
  modified_base 97..100: mod_base = OTHER; note = phosphorothioate linkage
  misc_feature 1..2: note = RNA
  misc_feature 3..10: note = DNA
  misc_feature 11..100: note = RNA

SEQ ID NO: 679 - DNA, 100 bp, synthetic construct; identical to SEQ ID NO: 73
  source 1..100: mol_type = other DNA
  modified_base 1..3: mod_base = OTHER; note = 2'-O-methyl ribonucleotide
  modified_base 98..100: mod_base = OTHER; note = 2'-O-methyl ribonucleotide
  modified_base 1..4: mod_base = OTHER; note = phosphorothioate linkage
  modified_base 97..100: mod_base = OTHER; note = phosphorothioate linkage
  misc_feature 1..5: note = RNA
  misc_feature 6: note = DNA
  misc_feature 11..15: note = RNA
  misc_feature 16: note = DNA
  misc_feature 17..100: note = RNA

SEQ ID NO: 680 - RNA, 101 nt, synthetic construct
  source 1..101: mol_type = other RNA
  modified_base 1..3: mod_base = OTHER; note = 2'-O-methyl ribonucleotide
  modified_base 22: mod_base = OTHER; note = 2'-O-methyl ribonucleotide
  modified_base 29..33: mod_base = OTHER; note = 2'-O-methyl ribonucleotide
  modified_base 35..43: mod_base = OTHER; note = 2'-O-methyl ribonucleotide
  modified_base 47: mod_base = OTHER; note = 2'-O-methyl ribonucleotide
  modified_base 49: mod_base = OTHER; note = 2'-O-methyl ribonucleotide
  modified_base 51: mod_base = OTHER; note = 2'-O-methyl ribonucleotide
  modified_base 53..58: mod_base = OTHER; note = 2'-O-methyl ribonucleotide
  modified_base 61..62: mod_base = OTHER; note = 2'-O-methyl ribonucleotide
  modified_base 67..68: mod_base = OTHER; note = 2'-O-methyl ribonucleotide
  modified_base 71..73: mod_base = OTHER; note = 2'-O-methyl ribonucleotide
  modified_base 75..82: mod_base = OTHER; note = 2'-O-methyl ribonucleotide
  modified_base 84..101: mod_base = OTHER; note = 2'-O-methyl ribonucleotide
  modified_base 1..4: mod_base = OTHER; note = phosphorothioate linkage
  modified_base 98..101: mod_base = OTHER; note = phosphorothioate linkage
aaagatacctgaataaccctcgttttagagctagaaatagcaagttaaaataaggctagtccgttatcaacttgaaaaagtggcaccgagtcggtgctttt

SEQ ID NO: 681 - RNA, 102 nt, synthetic construct
  source 1..102: mol_type = other RNA
  modified_base 1..4: mod_base = OTHER; note = 2'-O-methyl ribonucleotide
  modified_base 23: mod_base = OTHER; note = 2'-O-methyl ribonucleotide
  modified_base 30..34: mod_base = OTHER; note = 2'-O-methyl ribonucleotide
  modified_base 36..44: mod_base = OTHER; note = 2'-O-methyl ribonucleotide
  modified_base 48: mod_base = OTHER; note = 2'-O-methyl ribonucleotide
  modified_base 50: mod_base = OTHER; note = 2'-O-methyl ribonucleotide
  modified_base 52: mod_base = OTHER; note = 2'-O-methyl ribonucleotide
  modified_base 54..59: mod_base = OTHER; note = 2'-O-methyl ribonucleotide
  modified_base 62..63: mod_base = OTHER; note = 2'-O-methyl ribonucleotide
  modified_base 68..69: mod_base = OTHER; note = 2'-O-methyl ribonucleotide
  modified_base 72..74: mod_base = OTHER; note = 2'-O-methyl ribonucleotide
  modified_base 76..83: mod_base = OTHER; note = 2'-O-methyl ribonucleotide
  modified_base 85..102: mod_base = OTHER; note = 2'-O-methyl ribonucleotide
  modified_base 1..5: mod_base = OTHER; note = phosphorothioate linkage
  modified_base 99..102: mod_base = OTHER; note = phosphorothioate linkage
aaaagatacctgaataaccctcgttttagagctagaaatagcaagttaaaataaggctagtccgttatcaacttgaaaaagtggcaccgagtcggtgctttt

SEQ ID NO: 682 - RNA, 103 nt, synthetic construct
  source 1..103: mol_type = other RNA
  modified_base 1..5: mod_base = OTHER; note = 2'-O-methyl ribonucleotide
  modified_base 24: mod_base = OTHER; note = 2'-O-methyl ribonucleotide
  modified_base 31..35: mod_base = OTHER; note = 2'-O-methyl ribonucleotide
  modified_base 37..45: mod_base = OTHER; note = 2'-O-methyl ribonucleotide
  modified_base 49: mod_base = OTHER; note = 2'-O-methyl ribonucleotide
  modified_base 51: mod_base = OTHER; note = 2'-O-methyl ribonucleotide
  modified_base 53: mod_base = OTHER; note = 2'-O-methyl ribonucleotide
  modified_base 55..60: mod_base = OTHER; note = 2'-O-methyl ribonucleotide
  modified_base 63..64: mod_base = OTHER; note = 2'-O-methyl ribonucleotide
  modified_base 69..70: mod_base = OTHER; note = 2'-O-methyl ribonucleotide
  modified_base 73..75: mod_base = OTHER; note = 2'-O-methyl ribonucleotide
  modified_base 77..84: mod_base = OTHER; note = 2'-O-methyl ribonucleotide
  modified_base 86..103: mod_base = OTHER; note = 2'-O-methyl ribonucleotide
  modified_base 1..4: mod_base = OTHER; note = phosphorothioate linkage
  modified_base 100..103: mod_base = OTHER; note = phosphorothioate linkage
aaaaagatacctgaataaccctcgttttagagctagaaatagcaagttaaaataaggctagtccgttatcaacttgaaaaagtggcaccgagtcggtgctttt

SEQ ID NO: 683 - RNA, 104 nt, synthetic construct
  source 1..104: mol_type = other RNA
  modified_base 1..5: mod_base = OTHER; note = 2'-O-methyl ribonucleotide
  modified_base 25: mod_base = OTHER; note = 2'-O-methyl ribonucleotide
  modified_base 32..36: mod_base = OTHER; note = 2'-O-methyl ribonucleotide
  modified_base 38..46: mod_base = OTHER; note = 2'-O-methyl ribonucleotide
  modified_base 50: mod_base = OTHER; note = 2'-O-methyl ribonucleotide
  modified_base 52: mod_base = OTHER; note = 2'-O-methyl ribonucleotide
  modified_base 54: mod_base = OTHER; note = 2'-O-methyl ribonucleotide
  modified_base 56..61: mod_base = OTHER; note = 2'-O-methyl ribonucleotide
  modified_base 64..65: mod_base = OTHER; note = 2'-O-methyl ribonucleotide
  modified_base 70..71: mod_base = OTHER; note = 2'-O-methyl ribonucleotide
  modified_base 74..76: mod_base = OTHER; note = 2'-O-methyl ribonucleotide
  modified_base 78..85: mod_base = OTHER; note = 2'-O-methyl ribonucleotide
  modified_base 87..104: mod_base = OTHER; note = 2'-O-methyl ribonucleotide
  modified_base 1..4: mod_base = OTHER; note = phosphorothioate linkage
  modified_base 101..104: mod_base = OTHER; note = phosphorothioate linkage
gaaaaagatacctgaataaccctcgttttagagctagaaatagcaagttaaaataaggctagtccgttatcaacttgaaaaagtggcaccgagtcggtgctttt

SEQ ID NO: 684 - RNA, 105 nt, synthetic construct
  source 1..105: mol_type = other RNA
  modified_base 1..6: mod_base = OTHER; note = 2'-O-methyl ribonucleotide
  modified_base 26: mod_base = OTHER; note = 2'-O-methyl ribonucleotide
  modified_base 33..38: mod_base = OTHER; note = 2'-O-methyl ribonucleotide
  modified_base 40..48: mod_base = OTHER; note = 2'-O-methyl ribonucleotide
  modified_base 52: mod_base = OTHER; note = 2'-O-methyl ribonucleotide
  modified_base 54: mod_base = OTHER; note = 2'-O-methyl ribonucleotide
  modified_base 56: mod_base = OTHER; note = 2'-O-methyl ribonucleotide
  modified_base 58..63: mod_base = OTHER; note = 2'-O-methyl ribonucleotide
  modified_base 66..67: mod_base = OTHER; note = 2'-O-methyl ribonucleotide
  modified_base 72..73: mod_base = OTHER; note = 2'-O-methyl ribonucleotide
  modified_base 76..78: mod_base = OTHER; note = 2'-O-methyl ribonucleotide
  modified_base 80..87: mod_base = OTHER; note = 2'-O-methyl ribonucleotide
  modified_base 89..105: mod_base = OTHER; note = 2'-O-methyl ribonucleotide
  modified_base 1..5: mod_base = OTHER; note = phosphorothioate linkage
  modified_base 102..105: mod_base = OTHER; note = phosphorothioate linkage
agaaaaagatacctgaataaccctcgttttagagctagaaatagcaagttaaaataaggctagtccgttatcaacttgaaaaagtggcaccgagtcggtgctttt

SEQ ID NO: 685 - RNA, 107 nt, synthetic construct
  source 1..107: mol_type = other RNA
  modified_base 1..6: mod_base = OTHER; note = 2'-O-methyl ribonucleotide
  modified_base 28: mod_base = OTHER; note = 2'-O-methyl ribonucleotide
  modified_base 34..38: mod_base = OTHER; note = 2'-O-methyl ribonucleotide
  modified_base 40..48: mod_base = OTHER; note = 2'-O-methyl ribonucleotide
  modified_base 52: mod_base = OTHER; note = 2'-O-methyl ribonucleotide
  modified_base 54: mod_base = OTHER; note = 2'-O-methyl ribonucleotide
  modified_base 56: mod_base = OTHER; note = 2'-O-methyl ribonucleotide
  modified_base 58..63: mod_base = OTHER; note = 2'-O-methyl ribonucleotide
  modified_base 66..67: mod_base = OTHER; note = 2'-O-methyl ribonucleotide
  modified_base 72..73: mod_base = OTHER; note = 2'-O-methyl ribonucleotide
  modified_base 76..78: mod_base = OTHER; note = 2'-O-methyl ribonucleotide
  modified_base 80..87: mod_base = OTHER; note = 2'-O-methyl ribonucleotide
  modified_base 89..106: mod_base = OTHER; note = 2'-O-methyl ribonucleotide
  modified_base 1..5: mod_base = OTHER; note = phosphorothioate linkage
  modified_base 103..106: mod_base = OTHER; note = phosphorothioate linkage
tcagaaaaagatacctgaataaccctcgttttagagctagaaatagcaagttaaaataaggctagtccgttatcaacttgaaaaagtggcaccgagtcggtgctttt

SEQ ID NO: 686 - RNA, 109 nt, synthetic construct
  source 1..109: mol_type = other RNA
  modified_base 1..6: mod_base = OTHER; note = 2'-O-methyl ribonucleotide
  modified_base 30: mod_base = OTHER; note = 2'-O-methyl ribonucleotide
  modified_base 37..41: mod_base = OTHER; note = 2'-O-methyl ribonucleotide
  modified_base 43..51: mod_base = OTHER; note = 2'-O-methyl ribonucleotide
  modified_base 55: mod_base = OTHER; note = 2'-O-methyl ribonucleotide
  modified_base 57: mod_base = OTHER; note = 2'-O-methyl ribonucleotide
  modified_base 59: mod_base = OTHER; note = 2'-O-methyl ribonucleotide
  modified_base 61..66: mod_base = OTHER; note = 2'-O-methyl ribonucleotide
  modified_base 69..70: mod_base = OTHER; note = 2'-O-methyl ribonucleotide
  modified_base 75..76: mod_base = OTHER; note = 2'-O-methyl ribonucleotide
  modified_base 79..81: mod_base = OTHER; note = 2'-O-methyl ribonucleotide
  modified_base 83..90: mod_base = OTHER; note = 2'-O-methyl ribonucleotide
  modified_base 92..109: mod_base = OTHER; note = 2'-O-methyl ribonucleotide
  modified_base 1..6: mod_base = OTHER; note = phosphorothioate linkage
  modified_base 106..109: mod_base = OTHER; note = phosphorothioate linkage
tatcagaaaaagatacctgaataaccctcgttttagagctagaaatagcaagttaaaataaggctagtccgttatcaacttgaaaaagtggcaccgagtcggtgctttt

SEQ ID NO: 687 - RNA, 4929 nt, synthetic construct
  source 1..4929: mol_type = other RNA
  modified_base 7: mod_base = OTHER; note = N1-methylpseudouridine
  modified_base 25: mod_base = OTHER; note = N1-methylpseudouridine
  modified_base 35: mod_base = OTHER; note = N1-methylpseudouridine
  modified_base 37: mod_base = OTHER; note = N1-methylpseudouridine
  modified_base 49: mod_base = OTHER; note = N1-methylpseudouridine
  modified_base 58: mod_base = OTHER; note = N1-methylpseudouridine
  modified_base 63: mod_base = OTHER; note = N1-methylpseudouridine
  modified_base 64: mod_base = OTHER; note = N1-methylpseudouridine
  modified_base 75: mod_base = OTHER; note = N1-methylpseudouridine
  modified_base 78: mod_base = OTHER; note = N1-methylpseudouridine
  modified_base 82: mod_base = OTHER; note = N1-methylpseudouridine
  modified_base 94: mod_base = OTHER; note = N1-methylpseudouridine
  modified_base 100: mod_base = OTHER; note = N1-methylpseudouridine
  modified_base 130: mod_base = OTHER; note = N1-methylpseudouridine
  modified_base 136: mod_base = OTHER; note = N1-methylpseudouridine
  modified_base 145: mod_base = OTHER; note = N1-methylpseudouridine
  modified_base 148: mod_base = OTHER; note = N1-methylpseudouridine
  modified_base 151: mod_base = OTHER; note = N1-methylpseudouridine
  modified_base 154: mod_base = OTHER; note = N1-methylpseudouridine
  modified_base 166: mod_base = OTHER; note = N1-methylpseudouridine
  modified_base 169: mod_base = OTHER; note = N1-methylpseudouridine
  modified_base 180: mod_base = OTHER; note = N1-methylpseudouridine
  modified_base 193: mod_base = OTHER; note = N1-methylpseudouridine
  modified_base 199: mod_base = OTHER; note = N1-methylpseudouridine
  modified_base 226: mod_base = OTHER; note = N1-methylpseudouridine
  modified_base 229: mod_base = OTHER; note = N1-methylpseudouridine
  modified_base 235: mod_base = OTHER; note = N1-methylpseudouridine
  modified_base 250: mod_base = OTHER; note = N1-methylpseudouridine
  modified_base 253: mod_base = OTHER; note = N1-methylpseudouridine
  modified_base 256: mod_base = OTHER; note = N1-methylpseudouridine
  modified_base 264: mod_base = OTHER; note = N1-methylpseudouridine
  modified_base 271: mod_base = OTHER; note = N1-methylpseudouridine
  modified_base 274: mod_base = OTHER; note = N1-methylpseudouridine
  modified_base 286: mod_base = OTHER; note = N1-methylpseudouridine
  modified_base 288: mod_base = OTHER; note = N1-methylpseudouridine
  modified_base 292: mod_base = OTHER; note = N1-methylpseudouridine
  modified_base 297: mod_base = OTHER; note = N1-methylpseudouridine
  modified_base 298: mod_base = OTHER; note = N1-methylpseudouridine
  modified_base 306: mod_base = OTHER; note = N1-methylpseudouridine
  modified_base 310: mod_base = OTHER; note = N1-methylpseudouridine
  modified_base 313: mod_base = OTHER; note = N1-methylpseudouridine
  modified_base 315: mod_base = OTHER; note = N1-methylpseudouridine
  modified_base 328: mod_base = OTHER; note = N1-methylpseudouridine
  modified_base 331: mod_base = OTHER; note = N1-methylpseudouridine
  modified_base 343: mod_base = OTHER; note = N1-methylpseudouridine
  modified_base 352: mod_base = OTHER; note = N1-methylpseudouridine
  modified_base 355: mod_base = OTHER; note = N1-methylpseudouridine
  modified_base 357: mod_base = OTHER; note = N1-methylpseudouridine
  modified_base 358: mod_base = OTHER; note = N1-methylpseudouridine
  modified_base 364: mod_base = OTHER; note = N1-methylpseudouridine
  modified_base 397: mod_base = OTHER; note = N1-methylpseudouridine
  modified_base 400: mod_base = OTHER; note = N1-methylpseudouridine
  modified_base 406: mod_base = OTHER; note = N1-methylpseudouridine
  modified_base 409: mod_base = OTHER; note = N1-methylpseudouridine
  modified_base 424: mod_base = OTHER; note = N1-methylpseudouridine
  modified_base 436: mod_base = OTHER; note = N1-methylpseudouridine
  modified_base 442: mod_base = OTHER; note = N1-methylpseudouridine
  modified_base 454: mod_base = OTHER; note = N1-methylpseudouridine
  modified_base 457: mod_base = OTHER; note = N1-methylpseudouridine
  modified_base 468: mod_base = OTHER; note = N1-methylpseudouridine
  modified_base 478: mod_base = OTHER; note = N1-methylpseudouridine
  modified_base 481: mod_base = OTHER; note = N1-methylpseudouridine
  modified_base 483: mod_base = OTHER; note = N1-methylpseudouridine
  modified_base 489: mod_base = OTHER; note = N1-methylpseudouridine
  modified_base 490: mod_base = OTHER; note = N1-methylpseudouridine
  modified_base 492: mod_base = OTHER; note = N1-methylpseudouridine
  modified_base 493: mod_base = OTHER; note = N1-methylpseudouridine
  modified_base 499: mod_base = OTHER; note = N1-methylpseudouridine
  modified_base 511: mod_base = OTHER; note = N1-methylpseudouridine
  modified_base 513: mod_base = OTHER; note = N1-methylpseudouridine
  modified_base 514: mod_base = OTHER; note = N1-methylpseudouridine
  modified_base 654: mod_base = OTHER; note = N1-methylpseudouridine
  modified_base 661: mod_base = OTHER; note = N1-methylpseudouridine
  modified_base 667: mod_base = OTHER; note = N1-methylpseudouridine
  modified_base 673: mod_base = OTHER; note = N1-methylpseudouridine
  modified_base 688: mod_base = OTHER; note = N1-methylpseudouridine
  modified_base 693: mod_base = OTHER; note = N1-methylpseudouridine
  modified_base 700: mod_base = OTHER; note = N1-methylpseudouridine
  modified_base 703: mod_base = OTHER; note = N1-methylpseudouridine
  modified_base 714: mod_base = OTHER; note = N1-methylpseudouridine
  modified_base 721: mod_base = OTHER; note = N1-methylpseudouridine
  modified_base 735: mod_base = OTHER; note = N1-methylpseudouridine
  modified_base 736: mod_base = OTHER; note = N1-methylpseudouridine
  modified_base 742: mod_base = OTHER; note = N1-methylpseudouridine
  modified_base 745: mod_base = OTHER; note = N1-methylpseudouridine
  modified_base 769: mod_base = OTHER; note = N1-methylpseudouridine
  modified_base 781: mod_base = OTHER; note = N1-methylpseudouridine
  modified_base 784: mod_base = OTHER; note = N1-methylpseudouridine
  modified_base 793: mod_base = OTHER; note = N1-methylpseudouridine
  modified_base 796: mod_base = OTHER; note = N1-methylpseudouridine
  modified_base 798: mod_base = OTHER; note = N1-methylpseudouridine
  modified_base 799: mod_base = OTHER; note = N1-methylpseudouridine
  modified_base 832: mod_base = OTHER; note = N1-methylpseudouridine
  modified_base 855: mod_base = OTHER; note = N1-methylpseudouridine
  modified_base 877: mod_base = OTHER; note = N1-methylpseudouridine
  modified_base 879: mod_base = OTHER; note = N1-methylpseudouridine
  modified_base 882: mod_base = OTHER; note = N1-methylpseudouridine
  modified_base 886: mod_base = OTHER; note = N1-methylpseudouridine
  modified_base 895: mod_base = OTHER; note = N1-methylpseudouridine
  modified_base 897: mod_base = OTHER; note = N1-methylpseudouridine
  modified_base 898: mod_base = OTHER; note = N1-methylpseudouridine
  modified_base 910: mod_base = OTHER; note = N1-methylpseudouridine
  modified_base 919: mod_base = OTHER; note = N1-methylpseudouridine
  modified_base 930: mod_base = OTHER; note = N1-methylpseudouridine
  modified_base 931: mod_base = OTHER; note = N1-methylpseudouridine
  modified_base 933: mod_base = OTHER; note = N1-methylpseudouridine
  modified_base 934: mod_base = OTHER; note = N1-methylpseudouridine
  modified_base 943: mod_base = OTHER; note = N1-methylpseudouridine
  modified_base 954: mod_base = OTHER; note = N1-methylpseudouridine
  modified_base 955: mod_base = OTHER; note = N1-methylpseudouridine
  modified_base 958: mod_base = OTHER; note = N1-methylpseudouridine
  modified_base 961: mod_base = OTHER; note = N1-methylpseudouridine
  modified_base 994: mod_base = OTHER; note = N1-methylpseudouridine
  modified_base 996: mod_base = OTHER; note = N1-methylpseudouridine
  modified_base 997: mod_base = OTHER; note = N1-methylpseudouridine
  modified_base 1006: mod_base = OTHER; note = N1-methylpseudouridine
  modified_base 1009: mod_base = OTHER; note = N1-methylpseudouridine
  modified_base 1018: mod_base = OTHER; note = N1-methylpseudouridine
  modified_base 1023: mod_base = OTHER; note = N1-methylpseudouridine
  modified_base 1035: mod_base = OTHER; note = N1-methylpseudouridine
  modified_base 1045: mod_base = OTHER; note = N1-methylpseudouridine
  modified_base 1047: mod_base = OTHER; note = N1-methylpseudouridine
  modified_base 1054: mod_base = OTHER; note = N1-methylpseudouridine
  modified_base 1066: mod_base = OTHER; note = N1-methylpseudouridine
  modified_base 1069: mod_base = OTHER; note = N1-methylpseudouridine
  modified_base 1093: mod_base = OTHER; note = N1-methylpseudouridine
  modified_base 1099: mod_base = OTHER; note = N1-methylpseudouridine
  modified_base 1102: mod_base = OTHER; note = N1-methylpseudouridine
  modified_base 1104: mod_base = OTHER; note = N1-methylpseudouridine
  modified_base 1108: mod_base = OTHER; note = N1-methylpseudouridine
  modified_base 1114: mod_base = OTHER; note = N1-methylpseudouridine
  modified_base 1123: mod_base = OTHER; note = N1-methylpseudouridine
  modified_base 1126: mod_base = OTHER; note = N1-methylpseudouridine
  modified_base 1131: mod_base = OTHER; note = N1-methylpseudouridine
  modified_base 1132: mod_base = OTHER; note = N1-methylpseudouridine
  modified_base 1143: mod_base = OTHER; note = N1-methylpseudouridine
  modified_base 1144: mod_base = OTHER; note = N1-methylpseudouridine
  modified_base 1147: mod_base = OTHER; note = N1-methylpseudouridine
  modified_base 1150: mod_base = OTHER; note = N1-methylpseudouridine
  modified_base 1162: mod_base = OTHER; note = N1-methylpseudouridine
  modified_base 1183: mod_base = OTHER; note = N1-methylpseudouridine
  modified_base 1192: mod_base = OTHER; note = N1-methylpseudouridine
  modified_base 1194: mod_base = OTHER; note = N1-methylpseudouridine
  modified_base 1195: mod_base = OTHER; note = N1-methylpseudouridine
  modified_base 1198: mod_base = OTHER; note = N1-methylpseudouridine
  modified_base 1204: mod_base = OTHER; note = N1-methylpseudouridine
  modified_base 1207: mod_base = OTHER; note = N1-methylpseudouridine
  modified_base 1215: mod_base = OTHER; note = N1-methylpseudouridine
  modified_base 1225: mod_base = OTHER; note = N1-methylpseudouridine
  modified_base 1227: mod_base = OTHER; note = N1-methylpseudouridine
  modified_base 1228: mod_base = OTHER; note = N1-methylpseudouridine
  modified_base 1243: mod_base = OTHER; note = N1-methylpseudouridine
  modified_base 1258: mod_base = OTHER; note = N1-methylpseudouridine
  modified_base 1273: mod_base = OTHER; note = N1-methylpseudouridine
  modified_base 1276: mod_base = OTHER; note = N1-methylpseudouridine
  modified_base 1288: mod_base = OTHER; note = N1-methylpseudouridine
  modified_base 1306: mod_base = OTHER; note = N1-methylpseudouridine
  modified_base 1315: mod_base = OTHER; note = N1-methylpseudouridine
  modified_base 1318: mod_base = OTHER; note = N1-methylpseudouridine
  modified_base 1327: mod_base = OTHER; note = N1-methylpseudouridine
  modified_base 1351: mod_base = OTHER; note = N1-methylpseudouridine
  modified_base 1353: mod_base = OTHER; note = N1-methylpseudouridine
  modified_base 1354: mod_base = OTHER; note = N1-methylpseudouridine
  modified_base 1363: mod_base = OTHER; note = N1-methylpseudouridine
  modified_base 1366: mod_base = OTHER; note = N1-methylpseudouridine
  modified_base 1372: mod_base = OTHER; note = N1-methylpseudouridine
  modified_base 1378: mod_base = OTHER; note = N1-methylpseudouridine
  modified_base 1384: mod_base = OTHER; note = N1-methylpseudouridine
  modified_base 1395: mod_base = OTHER; note = N1-methylpseudouridine
  modified_base 1396: mod_base = OTHER; note = N1-methylpseudouridine
  modified_base 1407: mod_base = OTHER; note = N1-methylpseudouridine
  modified_base 1408: mod_base = OTHER; note = N1-methylpseudouridine
  modified_base 1414: mod_base = OTHER; note = N1-methylpseudouridine
  modified_base 1432: mod_base = OTHER; note = N1-methylpseudouridine
  modified_base 1438: mod_base = OTHER; note = N1-methylpseudouridine
  modified_base 1452: mod_base = OTHER; note = N1-methylpseudouridine
  modified_base 1465: mod_base = OTHER; note = N1-methylpseudouridine
  modified_base 1474: mod_base = OTHER; note = N1-methylpseudouridine
  modified_base 1477: mod_base = OTHER; note = N1-methylpseudouridine
  modified_base 1486: mod_base = OTHER; note = N1-methylpseudouridine
  modified_base 1497: mod_base = OTHER; note = N1-methylpseudouridine
  modified_base 1507: mod_base = OTHER; note = N1-methylpseudouridine
  modified_base 1509: mod_base = OTHER; note = N1-methylpseudouridine
  modified_base 1510: mod_base = OTHER; note = N1-methylpseudouridine
  modified_base 1513: mod_base = OTHER; note = N1-methylpseudouridine
  modified_base 1528: mod_base = OTHER; note = N1-methylpseudouridine
  modified_base 1540: mod_base = OTHER; note = N1-methylpseudouridine
  modified_base 1543: mod_base = OTHER; note = N1-methylpseudouridine
  modified_base 1546: mod_base = OTHER; note = N1-methylpseudouridine
  modified_base 1555: mod_base = OTHER; note = N1-methylpseudouridine
  modified_base 1558: mod_base = OTHER; note = N1-methylpseudouridine
  modified_base 1564: mod_base = OTHER; note = N1-methylpseudouridine
  modified_base 1576: mod_base = OTHER; note = N1-methylpseudouridine
  modified_base 1591: mod_base = OTHER; note = N1-methylpseudouridine
  modified_base 1603: mod_base = OTHER; note = N1-methylpseudouridine
  modified_base 1606: mod_base = OTHER; note = N1-methylpseudouridine
  modified_base 1614: mod_base = OTHER; note = N1-methylpseudouridine
  modified_base 1636: mod_base = OTHER; note = N1-methylpseudouridine
  modified_base 1642: mod_base = OTHER; note = N1-methylpseudouridine
  modified_base 1645: mod_base = OTHER; note = N1-methylpseudouridine
  modified_base 1654: mod_base = OTHER; note = N1-methylpseudouridine
  modified_base 1657: mod_base = OTHER; note = N1-methylpseudouridine
  modified_base 1669: mod_base = OTHER; note = N1-methylpseudouridine
  modified_base 1680: mod_base = OTHER; note = N1-methylpseudouridine
  modified_base 1690: mod_base = OTHER; note = N1-methylpseudouridine
  modified_base 1692: mod_base = OTHER; note = N1-methylpseudouridine
  modified_base 1693: mod_base = OTHER; note = N1-methylpseudouridine
  modified_base 1695: mod_base = OTHER; note = N1-methylpseudouridine
  modified_base 1696: mod_base = OTHER; note = N1-methylpseudouridine
  modified_base 1716: mod_base = OTHER; note = N1-methylpseudouridine
  modified_base 1725: mod_base = OTHER; note = N1-methylpseudouridine
  modified_base 1729: mod_base = OTHER; note = N1-methylpseudouridine
  modified_base 1755: mod_base = OTHER; note = N1-methylpseudouridine
  modified_base 1756: mod_base = OTHER; note = N1-methylpseudouridine
  modified_base 1758: mod_base = OTHER; note = N1-methylpseudouridine
  modified_base 1764: mod_base = OTHER; note = N1-methylpseudouridine
  modified_base 1765: mod_base = OTHER; note = N1-methylpseudouridine
  modified_base 1768: mod_base = OTHER; note = N1-methylpseudouridine
  modified_base 1777: mod_base = OTHER; note = N1-methylpseudouridine
  modified_base 1780: mod_base = OTHER; note = N1-methylpseudouridine
  modified_base 1789: mod_base = OTHER; note = N1-methylpseudouridine
  modified_base 1807: mod_base = OTHER; note = N1-methylpseudouridine
  modified_base 1810: mod_base = OTHER; note = N1-methylpseudouridine
  modified_base 1813: mod_base = OTHER; note = N1-methylpseudouridine
  modified_base 1819: mod_base = OTHER; note = N1-methylpseudouridine
  modified_base 1834: mod_base = OTHER; note = N1-methylpseudouridine
  modified_base 1837: mod_base = OTHER; note = N1-methylpseudouridine
  modified_base 1854: mod_base = OTHER; note = N1-methylpseudouridine
  modified_base 1855: mod_base = OTHER; note = N1-methylpseudouridine
  modified_base 1870: mod_base = OTHER; note = N1-methylpseudouridine
  modified_base 1882: mod_base = OTHER; note = N1-methylpseudouridine
  modified_base 1888: mod_base = OTHER; note = N1-methylpseudouridine
  modified_base 1897: mod_base = OTHER; note = N1-methylpseudouridine
  modified_base 1906: mod_base = OTHER; note = N1-methylpseudouridine
  modified_base 1909: mod_base = OTHER; note = N1-methylpseudouridine
  modified_base 1926: mod_base = OTHER; note = N1-methylpseudouridine
  modified_base 1927: mod_base = OTHER; note = N1-methylpseudouridine
  modified_base 1929: mod_base = OTHER; note = N1-methylpseudouridine
  modified_base 1935: mod_base = OTHER; note = N1-methylpseudouridine
  modified_base 1936: mod_base = OTHER; note = N1-methylpseudouridine
  modified_base 1939: mod_base = OTHER; note = N1-methylpseudouridine
  modified_base 1960: mod_base = OTHER; note = N1-methylpseudouridine
  modified_base 1969: mod_base = OTHER; note = N1-methylpseudouridine
  modified_base 1972: mod_base = OTHER; note = N1-methylpseudouridine
  modified_base 1977: mod_base = OTHER; note = N1-methylpseudouridine
  modified_base 1978: mod_base = OTHER; note = N1-methylpseudouridine
  modified_base 1984: mod_base = OTHER; note = N1-methylpseudouridine
  modified_base 1989: mod_base = OTHER; note = N1-methylpseudouridine
  modified_base 1992: mod_base = OTHER; note = N1-methylpseudouridine
  modified_base 1996: mod_base = OTHER; note = N1-methylpseudouridine
  modified_base 2005: mod_base = OTHER; note = N1-methylpseudouridine
  modified_base 2025: mod_base = OTHER; note = N1-methylpseudouridine
  modified_base 2026: mod_base = OTHER; note = N1-methylpseudouridine
  modified_base 2031: mod_base = OTHER; note = N1-methylpseudouridine
  modified_base 2035: mod_base = OTHER; note = N1-methylpseudouridine
  modified_base 2059: mod_base = OTHER; note = N1-methylpseudouridine
  modified_base 2067: mod_base = OTHER; note = N1-methylpseudouridine
  modified_base 2073: mod_base = OTHER; note = N1-methylpseudouridine
  modified_base 2074: mod_base = OTHER; note = N1-methylpseudouridine
  modified_base 2083: mod_base = OTHER; note = N1-methylpseudouridine
  modified_base 2086: mod_base = OTHER; note = N1-methylpseudouridine
  modified_base 2112: mod_base = OTHER; note = N1-methylpseudouridine
  modified_base 2113: mod_base = OTHER; note = N1-methylpseudouridine
  modified_base 2116: mod_base = OTHER; note = N1-methylpseudouridine
  modified_base 2125: mod_base = OTHER; note = N1-methylpseudouridine
  modified_base 2133: mod_base = OTHER; note = N1-methylpseudouridine
  modified_base 2134: mod_base = OTHER; note = N1-methylpseudouridine
  modified_base 2146: mod_base = OTHER; note = N1-methylpseudouridine
  modified_base 2161: mod_base = OTHER; note = N1-methylpseudouridine
  modified_base 2164: mod_base = OTHER; note = N1-methylpseudouridine
  modified_base 2179: mod_base = OTHER; note = N1-methylpseudouridine
  modified_base 2182: mod_base = OTHER; note = N1-methylpseudouridine
  modified_base 2184: mod_base = OTHER; note = N1-methylpseudouridine
  modified_base 2190: mod_base = OTHER; note = N1-methylpseudouridine
  modified_base 2193: mod_base = OTHER; note = N1-methylpseudouridine
  modified_base 2194: mod_base = OTHER; note = N1-methylpseudouridine
  modified_base 2200: mod_base = OTHER; note = N1-methylpseudouridine
  modified_base 2202: mod_base = OTHER; note = N1-methylpseudouridine
  modified_base 2212: mod_base = OTHER; note = N1-methylpseudouridine
  modified_base 2221: mod_base = OTHER; note = N1-methylpseudouridine
  modified_base 2226: mod_base = OTHER; note = N1-methylpseudouridine
  modified_base 2230: mod_base = OTHER; note = N1-methylpseudouridine
  modified_base 2242: mod_base = OTHER; note = N1-methylpseudouridine
  modified_base 2256: mod_base = OTHER; note = N1-methylpseudouridine
  modified_base 2257: mod_base = OTHER; note = N1-methylpseudouridine
  modified_base 2260: mod_base = OTHER; note = N1-methylpseudouridine
  modified_base 2284: mod_base = OTHER; note = N1-methylpseudouridine
  modified_base 2287: mod_base = OTHER; note = N1-methylpseudouridine
  modified_base 2293: mod_base = OTHER; note = N1-methylpseudouridine
  modified_base 2296: mod_base = OTHER; note = N1-methylpseudouridine
  modified_base 2298: mod_base = OTHER; note = N1-methylpseudouridine
  modified_base 2299: mod_base = OTHER; note = N1-methylpseudouridine
  modified_base 2317: mod_base = OTHER; note = N1-methylpseudouridine
  modified_base 2323: mod_base = OTHER; note = N1-methylpseudouridine
  modified_base 2332: mod_base = OTHER; note = N1-methylpseudouridine
  modified_base 2343: mod_base = OTHER; note = N1-methylpseudouridine
  modified_base 2346: mod_base = OTHER; note = N1-methylpseudouridine
  modified_base 2347: mod_base = OTHER; note = N1-methylpseudouridine
  modified_base 2356: mod_base = OTHER; note = N1-methylpseudouridine
  modified_base 2361: mod_base = OTHER; note = N1-methylpseudouridine
  modified_base 2364: mod_base = OTHER; note = N1-methylpseudouridine
  modified_base 2365: mod_base = OTHER; note = N1-methylpseudouridine
  modified_base 2374: mod_base = OTHER; note = N1-methylpseudouridine
  modified_base 2380: mod_base = OTHER; note = N1-methylpseudouridine
  modified_base 2389: mod_base = OTHER; note = N1-methylpseudouridine
  modified_base 2400: mod_base = OTHER; note = N1-methylpseudouridine
  modified_base 2401: mod_base = OTHER; note = N1-methylpseudouridine
  modified_base 2413: mod_base = OTHER; note = N1-methylpseudouridine
  modified_base 2421: mod_base = OTHER; note = N1-methylpseudouridine
  modified_base 2431: mod_base = OTHER; note = N1-methylpseudouridine
  modified_base 2434: mod_base = OTHER; note = N1-methylpseudouridine
  modified_base 2440: mod_base = OTHER; note = N1-methylpseudouridine
  modified_base 2443: mod_base = OTHER; note = N1-methylpseudouridine
  modified_base 2457: mod_base = OTHER; note = N1-methylpseudouridine
  modified_base 2458: mod_base = OTHER; note = N1-methylpseudouridine
  modified_base 2461: mod_base = OTHER; note = N1-methylpseudouridine
  modified_base 2485: mod_base = OTHER; note = N1-methylpseudouridine
  modified_base 2488: mod_base = OTHER; note = N1-methylpseudouridine
  modified_base 2497: mod_base = OTHER; note = N1-methylpseudouridine
  modified_base 2500: mod_base = OTHER; note = N1-methylpseudouridine
  modified_base 2503: mod_base = OTHER; note = N1-methylpseudouridine
  modified_base 2509: mod_base = OTHER; note = N1-methylpseudouridine
  modified_base 2515: mod_base = OTHER; note = N1-methylpseudouridine
  modified_base 2517: mod_base = OTHER; note = N1-methylpseudouridine
  modified_base 2518: mod_base = OTHER; note = N1-methylpseudouridine
  modified_base 2533: mod_base = OTHER; note = N1-methylpseudouridine
  modified_base 2536: mod_base = OTHER; note = N1-methylpseudouridine
  modified_base 2548: mod_base = OTHER; note = N1-methylpseudouridine
  modified_base 2556: mod_base = OTHER; note = N1-methylpseudouridine
  modified_base 2566: mod_base = OTHER; note = N1-methylpseudouridine
  modified_base 2568: mod_base = OTHER; note = N1-methylpseudouridine
  modified_base 2569: mod_base = OTHER; note = N1-methylpseudouridine
  modified_base 2581: mod_base = OTHER; note = N1-methylpseudouridine
  modified_base 2584: mod_base = OTHER; note = N1-methylpseudouridine
  modified_base 2593: mod_base = OTHER; note = N1-methylpseudouridine
  modified_base 2607: mod_base = OTHER; note = N1-methylpseudouridine
  modified_base 2616: mod_base = OTHER; note = N1-methylpseudouridine
  modified_base 2626: mod_base = OTHER; note = N1-methylpseudouridine
  modified_base 2638: mod_base = OTHER; note = N1-methylpseudouridine
  modified_base 2641: mod_base = OTHER; note = N1-methylpseudouridine
  modified_base 2650: mod_base = OTHER; note = N1-methylpseudouridine
  modified_base 2677: mod_base = OTHER; note = N1-methylpseudouridine
  modified_base 2680: mod_base = OTHER; note = N1-methylpseudouridine
  modified_base 2685: mod_base = OTHER; note = N1-methylpseudouridine
  modified_base 2686: mod_base = OTHER; note = N1-methylpseudouridine
  modified_base 2689: mod_base = OTHER; note = N1-methylpseudouridine
  modified_base 2703: mod_base = OTHER; note = N1-methylpseudouridine
  modified_base 2704: mod_base = OTHER; note = N1-methylpseudouridine
  modified_base 2718: mod_base = OTHER; note = N1-methylpseudouridine
  modified_base 2719: mod_base = OTHER; note = N1-methylpseudouridine
  modified_base 2722: mod_base = OTHER; note = N1-methylpseudouridine
  modified_base 2728: mod_base = OTHER; note = N1-methylpseudouridine
  modified_base 2731: mod_base = OTHER; note = N1-methylpseudouridine
  modified_base 2746: mod_base = OTHER; note = N1-methylpseudouridine
  modified_base 2751: mod_base = OTHER; note = N1-methylpseudouridine
  modified_base 2752: mod_base = OTHER; note = N1-methylpseudouridine
  modified_base 2764: mod_base = OTHER; note = N1-methylpseudouridine
  modified_base 2779: mod_base = OTHER; note = N1-methylpseudouridine
  modified_base 2800: mod_base = OTHER; note = N1-methylpseudouridine
  modified_base 2812: mod_base = OTHER; note = N1-methylpseudouridine
  modified_base 2821: mod_base = OTHER; note = N1-methylpseudouridine
  modified_base 2839: mod_base = OTHER; note = N1-methylpseudouridine
  modified_base 2851: mod_base = OTHER; note = N1-methylpseudouridine
  modified_base 2854: mod_base = OTHER; note = N1-methylpseudouridine
  modified_base 2863: mod_base = OTHER; note = N1-methylpseudouridine
  modified_base 2869: mod_base = OTHER; note = N1-methylpseudouridine
  modified_base 2872: mod_base = OTHER; note = N1-methylpseudouridine
  modified_base 2881: mod_base = OTHER; note = N1-methylpseudouridine
  modified_base 2884: mod_base = OTHER; note = N1-methylpseudouridine
  modified_base 2890: mod_base = OTHER; note = N1-methylpseudouridine
  modified_base 2893: mod_base = OTHER; note = N1-methylpseudouridine
  modified_base 2917: mod_base = OTHER; note = N1-methylpseudouridine
  modified_base 2920: mod_base = OTHER; note = N1-methylpseudouridine
  modified_base 2923: mod_base = OTHER; note = N1-methylpseudouridine
  modified_base 2929: mod_base = OTHER; note = N1-methylpseudouridine
  modified_base 2983: mod_base = OTHER; note = N1-methylpseudouridine
  modified_base 2992: mod_base = OTHER; note = N1-methylpseudouridine
  modified_base 3004: mod_base = OTHER; note = N1-methylpseudouridine
  modified_base 3013: mod_base = OTHER; note = N1-methylpseudouridine
  modified_base 3025: mod_base = OTHER; note = N1-methylpseudouridine
  modified_base 3028: mod_base = OTHER; note = N1-methylpseudouridine
  modified_base 3043: mod_base = OTHER; note = N1-methylpseudouridine
  modified_base 3058: mod_base = OTHER; note = N1-methylpseudouridine
  modified_base 3073: mod_base = OTHER; note = N1-methylpseudouridine
  modified_base 3075: mod_base = OTHER; note = N1-methylpseudouridine
  modified_base 3079: mod_base = OTHER; note = N1-methylpseudouridine
  modified_base 3081: mod_base = OTHER; note = N1-methylpseudouridine
  modified_base 3084: mod_base = OTHER; note = N1-methylpseudouridine
  modified_base 3088: mod_base = OTHER; note = N1-methylpseudouridine
  modified_base 3106: mod_base = OTHER; note = N1-methylpseudouridine
  modified_base 3108: mod_base = OTHER; note = N1-methylpseudouridine
  modified_base 3112: mod_base = OTHER; note = N1-methylpseudouridine
  modified_base 3124: mod_base = OTHER; note = N1-methylpseudouridine
  modified_base 3130: mod_base = OTHER; note = N1-methylpseudouridine
  modified_base 3139: mod_base = OTHER; note = N1-methylpseudouridine
  modified_base 3147: mod_base = OTHER; note = N1-methylpseudouridine
  modified_base 3154: mod_base = OTHER; note = N1-methylpseudouridine
  modified_base 3163: mod_base = OTHER; note = N1-methylpseudouridine
  modified_base 3166: mod_base = OTHER; note = N1-methylpseudouridine
  modified_base 3177: mod_base = OTHER; note = N1-methylpseudouridine
  modified_base 3178: mod_base = OTHER; note = N1-methylpseudouridine
  modified_base 3181: mod_base = OTHER; note = N1-methylpseudouridine
  modified_base 3196: mod_base = OTHER; note = N1-methylpseudouridine
  modified_base 3208: mod_base = OTHER; note = N1-methylpseudouridine
  modified_base 3211: mod_base = OTHER; note = N1-methylpseudouridine
  modified_base 3250: mod_base = OTHER; note = N1-methylpseudouridine
  modified_base 3265: mod_base = OTHER; note = N1-methylpseudouridine
  modified_base 3268: mod_base = OTHER; note = N1-methylpseudouridine
  modified_base 3277: mod_base = OTHER; note = N1-methylpseudouridine
  modified_base 3285: mod_base = OTHER; note = N1-methylpseudouridine
  modified_base 3288: mod_base = OTHER; note = N1-methylpseudouridine
  modified_base 3298: mod_base = OTHER; note = N1-methylpseudouridine
  modified_base 3301: mod_base = OTHER; note = N1-methylpseudouridine
  modified_base 3313: mod_base = OTHER; note = N1-methylpseudouridine
  modified_base 3316: mod_base = OTHER; note = N1-methylpseudouridine
  modified_base 3330: mod_base = OTHER; note = N1-methylpseudouridine
  modified_base 3331: mod_base = OTHER; note = N1-methylpseudouridine
  modified_base 3340: mod_base = OTHER; note = N1-methylpseudouridine
  modified_base 3364: mod_base = OTHER; note = N1-methylpseudouridine
  modified_base 3373: mod_base = OTHER; note = N1-methylpseudouridine
  modified_base 3387: mod_base = OTHER; note = N1-methylpseudouridine
  modified_base 3388: mod_base = OTHER; note = N1-methylpseudouridine
  modified_base 3391: mod_base = OTHER; note = N1-methylpseudouridine
  modified_base 3403: mod_base = OTHER; note = N1-methylpseudouridine
  modified_base 3406: mod_base = OTHER; note = N1-methylpseudouridine
  modified_base 3421: mod_base = OTHER; note = N1-methylpseudouridine
  modified_base 3433: mod_base = OTHER; note = N1-methylpseudouridine
  modified_base 3442: mod_base = OTHER; note = N1-methylpseudouridine
  modified_base 3445: mod_base = OTHER; note = N1-methylpseudouridine
  modified_base 3457: mod_base = OTHER; note = N1-methylpseudouridine
  modified_base 3468: mod_base = OTHER; note = N1-methylpseudouridine
  modified_base 3487: mod_base = OTHER; note = N1-methylpseudouridine
  modified_base 3490: mod_base = OTHER; note = N1-methylpseudouridine
  modified_base 3499: mod_base = OTHER; note = N1-methylpseudouridine
  modified_base 3505: mod_base = OTHER; note = N1-methylpseudouridine
  modified_base 3508: mod_base = OTHER; note = N1-methylpseudouridine
  modified_base 3514: mod_base = OTHER; note = N1-methylpseudouridine
  modified_base 3526: mod_base = OTHER; note = N1-methylpseudouridine
  modified_base 3529: mod_base = OTHER; note = N1-methylpseudouridine
  modified_base 3537: mod_base = OTHER; note = N1-methylpseudouridine
  modified_base 3538: mod_base = OTHER; note = N1-methylpseudouridine
  modified_base 3549: mod_base = OTHER; note = N1-methylpseudouridine
  modified_base 3550: mod_base = OTHER; note = N1-methylpseudouridine
  modified_base 3555: mod_base = OTHER; note = N1-methylpseudouridine
  modified_base 3556: mod_base = OTHER; note = N1-methylpseudouridine
  modified_base 3558: mod_base = OTHER; note = N1-methylpseudouridine
  modified_base 3565: mod_base = OTHER; note = N1-methylpseudouridine
  modified_base 3574: mod_base = OTHER; note = N1-methylpseudouridine
  modified_base 3582: mod_base = OTHER; note = N1-methylpseudouridine
  modified_base 3603: mod_base = OTHER; note = N1-methylpseudouridine
  modified_base 3607: mod_base = OTHER; note = N1-methylpseudouridine
  modified_base 3616: mod_base = OTHER; note = N1-methylpseudouridine
  modified_base 3619: mod_base = OTHER; note = N1-methylpseudouridine
  modified_base 3631: mod_base = OTHER; note = N1-methylpseudouridine
  modified_base 3634: mod_base = OTHER; note = N1-methylpseudouridine
  modified_base 3642: mod_base = OTHER; note = N1-methylpseudouridine
  modified_base 3652: mod_base = OTHER; note = N1-methylpseudouridine
  modified_base 3663: mod_base = OTHER; note = N1-methylpseudouridine
  modified_base 3664: mod_base = OTHER; note = N1-methylpseudouridine
  modified_base 3667: mod_base = OTHER; note = N1-methylpseudouridine
  modified_base 3669: mod_base = OTHER; note = N1-methylpseudouridine
  modified_base 3678: mod_base = OTHER; note = N1-methylpseudouridine
  modified_base 3685: mod_base = OTHER; note = N1-methylpseudouridine
  modified_base 3687: mod_base = OTHER; note = N1-methylpseudouridine
  modified_base 3694: mod_base = OTHER; note = N1-methylpseudouridine
  modified_base 3703: mod_base = OTHER; note = N1-methylpseudouridine
  modified_base 3706: mod_base = OTHER; note = N1-methylpseudouridine
  modified_base 3727: mod_base = OTHER; note = N1-methylpseudouridine
  modified_base 3747: mod_base = OTHER; note = N1-methylpseudouridine
  modified_base 3750: mod_base = OTHER; note = N1-methylpseudouridine
  modified_base 3751: mod_base = OTHER; note = N1-methylpseudouridine
  modified_base 3753: mod_base = OTHER; note = N1-methylpseudouridine
  modified_base 3754: mod_base = OTHER; note = N1-methylpseudouridine
  modified_base 3756: mod_base = OTHER; note = N1-methylpseudouridine
  modified_base 3766: mod_base = OTHER; note = N1-methylpseudouridine
  modified_base 3769: mod_base = OTHER; note = N1-methylpseudouridine
  modified_base 3774: mod_base = OTHER; note = N1-methylpseudouridine
  modified_base 3775: mod_base = OTHER; note = N1-methylpseudouridine
  modified_base 3777: mod_base = OTHER; note = N1-methylpseudouridine
  modified_base 3778: mod_base = OTHER; note = N1-methylpseudouridine
  modified_base 3790: mod_base = OTHER; note = N1-methylpseudouridine
  modified_base 3796: mod_base = OTHER; note = N1-methylpseudouridine
  modified_base 3811: mod_base = OTHER; note = N1-methylpseudouridine
  modified_base 3826: mod_base = OTHER; note = N1-methylpseudouridine
  modified_base 3829: mod_base = OTHER; note = N1-methylpseudouridine
  modified_base 3856: mod_base = OTHER; note = N1-methylpseudouridine
  modified_base 3859: mod_base = OTHER; note = N1-methylpseudouridine
  modified_base 3861: mod_base = OTHER; note = N1-methylpseudouridine
  modified_base 3879: mod_base = OTHER; note = N1-methylpseudouridine
  modified_base 3880: mod_base = OTHER; note = N1-methylpseudouridine
  modified_base 3889: mod_base = OTHER; note = N1-methylpseudouridine
  modified_base 3898: mod_base = OTHER; note = N1-methylpseudouridine
  modified_base 3901: mod_base = OTHER; note = N1-methylpseudouridine
  modified_base 3907: mod_base = OTHER; note = N1-methylpseudouridine
  modified_base 3916: mod_base = OTHER; note = N1-methylpseudouridine
  modified_base 3922: mod_base = OTHER; note = N1-methylpseudouridine
  modified_base 3925: mod_base = OTHER; note = N1-methylpseudouridine
  modified_base 3940: mod_base = OTHER; note = N1-methylpseudouridine
  modified_base 3954: mod_base = OTHER; note = N1-methylpseudouridine
  modified_base 3955: mod_base = OTHER; note = N1-methylpseudouridine
  modified_base 3970: mod_base = OTHER; note = N1-methylpseudouridine
  modified_base 3973: mod_base = OTHER; note = N1-methylpseudouridine
  modified_base 3997: mod_base = OTHER; note = N1-methylpseudouridine
  modified_base 4000: mod_base = OTHER; note = N1-methylpseudouridine
  modified_base 4017: mod_base = OTHER; note = N1-methylpseudouridine
  modified_base 4032: mod_base = OTHER; note = N1-methylpseudouridine
  modified_base 4041: mod_base = OTHER; note = N1-methylpseudouridine
  modified_base 4042: mod_base = OTHER; note = N1-methylpseudouridine
  modified_base 4057: mod_base = OTHER; note = N1-methylpseudouridine
  modified_base 4062: mod_base = OTHER; note = N1-methylpseudouridine
  modified_base 4069: mod_base = OTHER; note = N1-methylpseudouridine
  modified_base 4072: mod_base = OTHER; note = N1-methylpseudouridine
  modified_base 4075: mod_base = OTHER; note = N1-methylpseudouridine
  modified_base 4078: mod_base = OTHER; note = N1-methylpseudouridine
  modified_base 4087: mod_base = OTHER; note = N1-methylpseudouridine
  modified_base 4111: mod_base = OTHER; note = N1-methylpseudouridine
  modified_base 4120: mod_base = OTHER; note = N1-methylpseudouridine
  modified_base 4129: mod_base = OTHER; note = N1-methylpseudouridine
  modified_base 4132: mod_base = OTHER; note = N1-methylpseudouridine
  modified_base 4138: mod_base = OTHER; note = N1-methylpseudouridine
  modified_base 4144: mod_base = OTHER; note = N1-methylpseudouridine
  modified_base 4147: mod_base = OTHER; note = N1-methylpseudouridine
  modified_base 4161: mod_base = OTHER; note = N1-methylpseudouridine
  modified_base 4162: mod_base = OTHER; note = N1-methylpseudouridine
  modified_base 4177: mod_base = OTHER; note = N1-methylpseudouridine
  modified_base 4182: mod_base = OTHER; note = N1-methylpseudouridine
  modified_base 4183: mod_base = OTHER; note = N1-methylpseudouridine
  modified_base 4186: mod_base = OTHER; note = N1-methylpseudouridine
  modified_base 4200: mod_base = OTHER; note = N1-methylpseudouridine
  modified_base 4210: mod_base = OTHER; note = N1-methylpseudouridine
  modified_base 4222: mod_base = OTHER; note = N1-methylpseudouridine
  modified_base 4225: mod_base = OTHER; note = N1-methylpseudouridine
  modified_base 4228: mod_base = OTHER; note = N1-methylpseudouridine
  modified_base 4234: mod_base = OTHER; note = N1-methylpseudouridine
  modified_base 4242: mod_base = OTHER; note = N1-methylpseudouridine
  modified_base 4249: mod_base = OTHER; note = N1-methylpseudouridine
  modified_base 4251: mod_base = OTHER; note = N1-methylpseudouridine
  modified_base 4252: mod_base = OTHER; note = N1-methylpseudouridine
  modified_base 4258: mod_base = OTHER; note = N1-methylpseudouridine
  modified_base 4279: mod_base = OTHER; note = N1-methylpseudouridine
  modified_base 4282: mod_base = OTHER; note = N1-methylpseudouridine
  modified_base 4300: mod_base = OTHER; note = N1-methylpseudouridine
  modified_base 4318: mod_base = OTHER; note = N1-methylpseudouridine
  modified_base 4324: mod_base = OTHER; note = N1-methylpseudouridine
  modified_base 4335: mod_base = OTHER; note = N1-methylpseudouridine
  modified_base 4339: mod_base = OTHER; note = N1-methylpseudouridine
  modified_base 4344: mod_base = OTHER; note = N1-methylpseudouridine
  modified_base 4345: mod_base = OTHER; note = N1-methylpseudouridine
  modified_base 4348: mod_base = OTHER; note = N1-methylpseudouridine
  modified_base 4350: mod_base = OTHER; note = N1-methylpseudouridine
  modified_base 4354: mod_base = OTHER; note = N1-methylpseudouridine
  modified_base 4365: mod_base = OTHER; note = N1-methylpseudouridine
  modified_base 4375: mod_base = OTHER; note = N1-methylpseudouridine
  modified_base 4411: mod_base = OTHER; note = N1-methylpseudouridine
  modified_base 4413: mod_base = OTHER; note = N1-methylpseudouridine
  modified_base 4414: mod_base = OTHER; note = N1-methylpseudouridine
  modified_base 4417: mod_base = OTHER; note = N1-methylpseudouridine
  modified_base 4434: mod_base = OTHER; note = N1-methylpseudouridine
  modified_base 4438: mod_base = OTHER; note = N1-methylpseudouridine
  modified_base 4447: mod_base = OTHER; note = N1-methylpseudouridine
  modified_base 4450: mod_base = OTHER; note = N1-methylpseudouridine
  modified_base 4459: mod_base = OTHER; note = N1-methylpseudouridine
  modified_base 4467: mod_base = OTHER; note = N1-methylpseudouridine
  modified_base 4468: mod_base = OTHER; note = N1-methylpseudouridine
  modified_base 4480: mod_base = OTHER; note = N1-methylpseudouridine
  modified_base 4483: mod_base = OTHER; note = N1-methylpseudouridine
  modified_base 4486: mod_base = OTHER; note = N1-methylpseudouridine
  modified_base 4501: mod_base = OTHER; note = N1-methylpseudouridine
  modified_base 4510: mod_base = OTHER; note = N1-methylpseudouridine
  modified_base 4513: mod_base = OTHER; note = N1-methylpseudouridine
  modified_base 4521: mod_base = OTHER; note = N1-methylpseudouridine
  modified_base 4546: mod_base = OTHER; note = N1-methylpseudouridine
  modified_base 4567: mod_base = OTHER; note = N1-methylpseudouridine
  modified_base 4570: mod_base = OTHER; note = N1-methylpseudouridine
  modified_base 4576: mod_base = OTHER; note = N1-methylpseudouridine
  modified_base 4578: mod_base = OTHER; note = N1-methylpseudouridine
  modified_base 4579: mod_base = OTHER; note = N1-methylpseudouridine
  modified_base 4585: mod_base = OTHER; note = N1-methylpseudouridine
  modified_base 4594: mod_base = OTHER; note = N1-methylpseudouridine
  modified_base 4611: mod_base = OTHER; note = N1-methylpseudouridine
  modified_base 4612: mod_base = OTHER; note = N1-methylpseudouridine
  modified_base 4617: mod_base = OTHER; note = N1-methylpseudouridine
  modified_base 4620: mod_base = OTHER; note = N1-methylpseudouridine
  modified_base 4621: mod_base = OTHER; note = N1-methylpseudouridine
  modified_base 4633: mod_base = OTHER; note = N1-methylpseudouridine
  modified_base 4647: mod_base = OTHER; note = N1-methylpseudouridine
  modified_base 4666: mod_base = OTHER; note = N1-methylpseudouridine
  modified_base 4669: mod_base = OTHER; note = N1-methylpseudouridine
  modified_base 4681: mod_base = OTHER; note = N1-methylpseudouridine
  modified_base 4684: mod_base = OTHER; note = N1-methylpseudouridine
  modified_base 4696: mod_base = OTHER; note = N1-methylpseudouridine
  modified_base 4705: mod_base = OTHER; note = N1-methylpseudouridine
  modified_base 4707: mod_base = OTHER; note = N1-methylpseudouridine
  modified_base 4720: mod_base = OTHER; note = N1-methylpseudouridine
  modified_base 4726: mod_base = OTHER; note = N1-methylpseudouridine
  modified_base 4735: mod_base = OTHER; note = N1-methylpseudouridine
  modified_base 4782: mod_base = OTHER; note = N1-methylpseudouridine
  modified_base 4783: mod_base = OTHER; note = N1-methylpseudouridine
  modified_base 4810: mod_base = OTHER; note = N1-methylpseudouridine
  modified_base 4812: mod_base = OTHER; note = N1-methylpseudouridine
  modified_base 4823: mod_base = OTHER; note = N1-methylpseudouridine
  modified_base 4824: mod_base = OTHER; note = N1-methylpseudouridine
  modified_base 4827: mod_base = OTHER; note = N1-methylpseudouridine
  modified_base 4828: mod_base = OTHER; note = N1-methylpseudouridine
  modified_base 4833: mod_base = OTHER; note = N1-methylpseudouridine
  modified_base 4837: mod_base = OTHER; note = N1-methylpseudouridine
  modified_base 4838: mod_base = OTHER; note = N1-methylpseudouridine
  modified_base 4840: mod_base = OTHER; note = N1-methylpseudouridine
  modified_base 4848: mod_base = OTHER; note = N1-methylpseudouridine
  modified_base 4849: mod_base = OTHER; note = N1-methylpseudouridine
  modified_base 4853: mod_base = OTHER; note = N1-methylpseudouridine
  modified_base 4854: mod_base = OTHER; note = N1-methylpseudouridine
  modified_base 4856: mod_base = OTHER; note = N1-methylpseudouridine
  modified_base 4862: mod_base = OTHER; note = N1-methylpseudouridine
  modified_base 4867: mod_base = OTHER; note = N1-methylpseudouridine
  modified_base 4868: mod_base = OTHER; note = N1-methylpseudouridine
  modified_base 4870: mod_base = OTHER; note = N1-methylpseudouridine
  modified_base 4871: mod_base = OTHER; note = N1-methylpseudouridine
  modified_base 4873: mod_base = OTHER; note = N1-methylpseudouridine
  modified_base 4875: mod_base = OTHER; note = N1-methylpseudouridine
  modified_base 4879: mod_base = OTHER; note = N1-methylpseudouridine
  modified_base 4880: mod_base = OTHER; note = N1-methylpseudouridine
  modified_base 4886: mod_base = OTHER; note = N1-methylpseudouridine
  modified_base 4888: mod_base = OTHER; note = N1-methylpseudouridine
  modified_base 4892: mod_base = OTHER; note = N1-methylpseudouridine
  modified_base 4894: mod_base = OTHER; note = N1-methylpseudouridine
  modified_base 4895: mod_base = OTHER; note = N1-methylpseudouridine
  modified_base 4898: mod_base = OTHER; note = N1-methylpseudouridine
  modified_base 4900: mod_base = OTHER; note = N1-methylpseudouridine
  modified_base 4901: mod_base = OTHER; note = N1-methylpseudouridine
  modified_base 4902: mod_base = OTHER; note = N1-methylpseudouridine
  modified_base 4906: mod_base = OTHER; note = N1-methylpseudouridine
  modified_base 4913: mod_base = OTHER; note = N1-methylpseudouridine
  modified_base 4917: mod_base = OTHER; note = N1-methylpseudouridine
  modified_base 4924: mod_base = OTHER; note = N1-methylpseudouridine
  modified_base 4926: mod_base = OTHER; note = N1-methylpseudouridine
aggaaataagagagaaaagaagagtaagaagaaatataagagccaccatgagcgaggtggagttcagccacgagtactggatgcggcacgccctgaccctggccaagcgggcccgggacgagcgggaggtgcccgtgggcgccgtgctggtgctgaacaaccgggtgatcggcgagggctggaaccgggccatcggcctgcacgaccccaccgcccacgccgagatcatggccctgcggcagggcggcctggtgatgcagaactaccggctgatcgacgccaccctgtacgtgaccttcgagccctgcgtgatgtgcgccggcgccatgatccacagccggatcggccgggtggtgttcggcgtgcggaacgccaagaccggcgccgccggcagcctgatggacgtgctgcaccaccccggcatgaaccaccgggtggagatcaccgagggcatcctggccgacgagtgcgccgccctgctgtgccggttcttccggatgccccggcgggtgttcaacgcccagaagaaggcccagagcagcaccgacagcggcggcagcagcggcggcagcagcggcagcgagacacccggcaccagcgagagcgccacccccgagagcagcggcggcagcagcggcggcagcgacaagaagtacagcatcggcctggccatcggcaccaacagcgtgggctgggccgtgatcaccgacgagtacaaggtgcccagcaagaagttcaaggtgctgggcaacaccgaccggcacagcatcaagaagaacctgatcggcgccctgctgttcgacagcggcgagacagccgaggccacccggctgaagcggaccgcccggcggcggtacacccggcggaagaaccggatctgctacctgcaggagatcttcagcaacgagatggccaaggtggacgacagcttcttccaccggctggaggagagcttcctggtggaggaggacaagaagcacgagcggcaccccatcttcggcaacatcgtggacgaggtggcctaccacgagaagtaccccaccatctaccacctgcggaagaagctggtggacagcaccgacaaggccgacctgcggctgatctacctggccctggcccacatgatcaagttccggggccacttcctgatcgagggcgacctgaaccccgacaacagcgacgtggacaagctgttcatccagctggtgcagacctacaaccagctgttcgaggagaaccccatcaacgccagcggcgtggacgccaaggccatcctgagcgcccggctgagcaagagccggcggctggagaacctgatcgcccagctgcccggcgagaagaagaacggcctgttcggcaacctgatcgccctgagcctgggcctgacccccaacttcaagagcaacttcgacctggccgaggacgccaagctgcagctgagcaaggacacctacgacgacgacctggacaacctgctggcccagatcggcgaccagtacgccgacctgttcctggccgccaagaacctgagcgacgccatcctgctgagcgacatcctgcgggtgaacaccgagatcaccaaggcccccctgagcgccagcatgatcaagcggtacgacgagcaccaccaggacctgaccctgctgaaggccctggtgcggcagcagctgcccgagaagtacaaggagatcttcttcgaccagagcaagaacggctacgccggctacatcgacggcggcgccagccaggaggagttctacaagttcatcaagcccatcctggagaagatggacggcaccgaggagctgctggtgaagctgaaccgggaggacctgctgcggaagcagcggaccttcgacaacggcagcatcccccaccagatccacctgggcgagctgcacgccatcctgcggcggcaggaggacttctaccccttcctgaaggacaaccgggagaagatcgagaagatcctgaccttccggatcccctactacgtgggccccctggcccggggcaacagccggttcgcctggatgacccgcaagagcgaggagacaatcaccccctggaacttcgaggaggtggtggacaagggcgccagcgcccagagcttcatcgagcggatgaccaacttcgacaagaacctgcccaacgagaaggtgctgcccaagcacagcctgctgtacgagtacttcaccgtgtacaacgagctgaccaaggtgaagtacgtgaccgagggcatgcggaagcccgccttcctgagcggcgagcagaagaaggccatcgtggacctgctgttcaagaccaaccggaaggtgaccgtgaagcagctgaaggaggactacttcaagaagatcgagtgcttcgacagcgtggagatcagcggcgtggaggaccggttcaacgccagcctgggcacctaccacgacctgctgaagatcatcaaggacaaggacttcctggacaacgaggagaacgaggacatcctggaggacatcgtgctgaccctgaccctgttcgaggaccgggagatgatcgaggagcggctgaagacctacgcccacctgttcgacgacaaggtgatgaagcagctgaagcggcggcggtacaccggctggggccggctgagccggaagctgatcaacggcatccgggacaagcagagcggcaagaccatcctggacttcctcaagagcgacggcttcgccaaccggaacttcatgcagctgatccacgacgacagcctgaccttcaaggaggacatccagaaggcccaggtgagcggccagggcgacagcctgcacgagcacatcgccaacctggccggcagccccgccatcaagaagggcatcctgcagaccgtgaaggtggtggacgagctggtgaaggtgatgggccggcacaagcccgagaacatcgtgatcgagatggcccgggagaaccagaccacccagaagggccagaagaacagccgggagcggatgaagcggatcgaggagggcatcaaggagctgggcagccagatcctgaaggagcaccccgtggagaacacccagctgcagaacgagaagctgtacctgtactacctgcagaacggccgggacatgtacgtggaccaggagctggacatcaaccggctgagcgactacgacgtggaccacatcgtgccccagagcttcctgaaggacgacagcatcgacaacaaggtgctgacccggagcgacaagaaccggggcaagagcgacaacgtgcccagcgaggaggtggtgaagaagatgaagaactactggcggcagctgctgaacgccaagctgatcacccagcggaagttcgacaacctgaccaaggccgagcggggcggcctgagcgagctggacaaggccggcttcatcaagcggcagctggtggagacacggcagatcaccaagcacgtggcccagatcctggacagccggatgaacaccaagtacgacgagaacgacaagctgatccgggaggtgaaggtgatcaccctcaagagcaagctggtgagcgacttccggaaggacttccagttctacaaggtgcgggagatcaacaactaccaccacgcccacgacgcctacctgaacgccgtggtgggcaccgccctgatcaagaagtaccccaagctggagagcgagttcgtgtacggcgactacaaggtgtacgacgtgcggaagatgatcgccaagagcgagcaggagatcggcaaggccaccgccaagtacttcttctacagcaacatcatgaacttcttcaagaccgagatcaccctggccaacggcgagatccggaagcggcccctgatcgagacaaacggcgagacaggcgagatcgtgtgggacaagggccgggacttcgccaccgtgcggaaggtgctgagcatgccccaggtgaacatcgtgaagaagaccgaggtgcagaccggcggcttcagcaaggagagcatcctgcccaagcggaacagcgacaagctgatcgcccggaagaaggactgggaccccaagaagtacggcggcttcgagagccccaccgtggcctacagcgtgctggtggtggccaaggtggagaagggcaagagcaagaagctcaagagcgtgaaggagctgctgggcatcaccatcatggagcggagcagcttcgagaagaaccccatcgacttcctggaggccaagggctacaaggaggtgaagaaggacctgatcatcaagctgcccaagtacagcctgttcgagctggagaacggccggaagcggatgctggccagcgccggcgagctgcagaagggcaacgagctggccctgcccagcaagtacgtgaacttcctgtacctggccagccactacgagaagctgaagggcagccccgaggacaacgagcagaagcagctgttcgtggagcagcacaagcactacctggacgagatcatcgagcagatcagcgagttcagcaagcgggtgatcctggccgacgccaacctggacaaggtgctgagcgcctacaacaagcaccgggacaagcccatccgggagcaggccgagaacatcatccacctgttcaccctgaccaacctgggcgcccccgccgccttcaagtacttcgacaccaccatcgaccggaagcggtacaccagcaccaaggaggtgctggacgccaccctgatccaccagagcatcaccggcctgtacgagacacggatcgacctgagccagctgggcggcgacgagggcgccgacaagcggaccgccgacggcagcgagttcgagagccccaagaagaagcggaaggtgtgagcggccgcttaattaagctgccttctgcggggcttgccttctggccatgcccttcttctctcccttgcacctgtacctcttggtctttgaataaagcctgagtaggaagtctaga

SEQ ID NO: 688 - protein, 1588 aa, synthetic construct
MSEVEFSHEYWMRHALTLAKRARDEREVPVGAVLVLNNRVIGEGWNRAIGLHDPTAHAEIMALRQGGLVMQNYRLIDATLYVTFEPCVMCAGAMIHSRIGRVVFGVRNAKTGAAGSLMDVLHHPGMNHRVEITEGILADECAALLCRFFRMPRRVFNAQKKAQSSTDSGGSSGGSSGSETPGTSESATPESSGGSSGGSDKKYSIGLAIGTNSVGWAVITDEYKVPSKKFKVLGNTDRHSIKKNLIGALLFDSGETAEATRLKRTARRRYTRRKNRICYLQEIFSNEMAKVDDSFFHRLEESFLVEEDKKHERHPIFGNIVDEVAYHEKYPTIYHLRKKLVDSTDKADLRLIYLALAHMIKFRGHFLIEGDLNPDNSDVDKLFIQLVQTYNQLFEENPINASGVDAKAILSARLSKSRRLENLIAQLPGEKKNGLFGNLIALSLGLTPNFKSNFDLAEDAKLQLSKDTYDDDLDNLLAQIGDQYADLFLAAKNLSDAILLSDILRVNTEITKAPLSASMIKRYDEHHQDLTLLKALVRQQLPEKYKEIFFDQSKNGYAGYIDGGASQEEFYKFIKPILEKMDGTEELLVKLNREDLLRKQRTFDNGSIPHQIHLGELHAILRRQEDFYPFLKDNREKIEKILTFRIPYYVGPLARGNSRFAWMTRKSEETITPWNFEEVVDKGASAQSFIERMTNFDKNLPNEKVLPKHSLLYEYFTVYNELTKVKYVTEGMRKPAFLSGEQKKAIVDLLFKTNRKVTVKQLKEDYFKKIECFDSVEISGVEDRFNASLGTYHDLLKIIKDKDFLDNEENEDILEDIVLTLTLFEDREMIEERLKTYAHLFDDKVMKQLKRRRYTGWGRLSRKLINGIRDKQSGKTILDFLKSDGFANRNFMQLIHDDSLTFKEDIQKAQVSGQGDSLHEHIANLAGSPAIKKGILQTVKVVDELVKVMGRHKPENIVIEMARENQTTQKGQKNSRERMKRIEEGIKELGSQILKEHPVENTQLQNEKLYLYYLQNGRDMYVDQELDINRLSDYDVDHIVPQSFLKDDSIDNKVLTRSDKNRGKSDNVPSEEVVKKMKNYWRQLLNAKLITQRKFDNLTKAERGGLSELDKAGFIKRQLVETRQITKHVAQILDSRMNTKYDENDKLIREVKVITLKSKLVSDFRKDFQFYKVREINNYHHAHDAYLNAVVGTALIKKYPKLESEFVYGDYKVYDVRKMIAKSEQEIGKATAKYFFYSNIMNFFKTEITLANGEIRKRPLIETNGETGEIVWDKGRDFATVRKVLSMPQVNIVKKTEVQTGGFSKESILPKRNSDKLIARKKDWDPKKYGGFESPTVAYSVLVVAKVEKGKSKKLKSVKELLGITIMERSSFEKNPIDFLEAKGYKEVKKDLIIKLPKYSLFELENGRKRMLASAGELQKGNELALPSKYVNFLYLASHYEKLKGSPEDNEQKQLFVEQHKHYLDEIIEQISEFSKRVILADANLDKVLSAYNKHRDKPIREQAENIIHLFTLTNLGAPAAFKYFDTTIDRKRYTSTKEVLDATLIHQSITGLYETRIDLSQLGGDEGADKRTADGSEFESPKKKRKV

SEQ ID NO: 689 - RNA, 47 nt, synthetic construct
  source 1..47: mol_type = other RNA
  modified_base 1: mod_base = OTHER; note = 2'-O-methyl ribonucleotide
  modified_base 7: mod_base = OTHER; note = N1-methyl pseudouridine
  modified_base 25: mod_base = OTHER; note = N1-methyl pseudouridine
  modified_base 35: mod_base = OTHER; note = N1-methyl pseudouridine
  modified_base 37: mod_base = OTHER; note = N1-methyl pseudouridine
aggaaataagagagaaaagaagagtaagaagaaatataagagccacc

SEQ ID NO: 690 - RNA, 501 nt, synthetic construct
  source 1..501: mol_type = other RNA
  modified_base 2: mod_base = OTHER; note = N1-methylpseudouridine
  modified_base 11: mod_base = OTHER; note = N1-methylpseudouridine
  modified_base 16: mod_base = OTHER; note = N1-methylpseudouridine
  modified_base 17: mod_base = OTHER; note = N1-methylpseudouridine
  modified_base 28: mod_base = OTHER; note = N1-methylpseudouridine
  modified_base 31: mod_base = OTHER; note = N1-methylpseudouridine
  modified_base 35: mod_base = OTHER; note = N1-methylpseudouridine
  modified_base 47: mod_base = OTHER; note = N1-methylpseudouridine
  modified_base 53: mod_base = OTHER; note = N1-methylpseudouridine
  modified_base 83: mod_base = OTHER; note = N1-methylpseudouridine
  modified_base 89: mod_base = OTHER; note = N1-methylpseudouridine
  modified_base 98: mod_base = OTHER; note = N1-methylpseudouridine
  modified_base 101: mod_base = OTHER; note = N1-methylpseudouridine
  modified_base 104: mod_base = OTHER; note = N1-methylpseudouridine
  modified_base 107: mod_base = OTHER; note = N1-methylpseudouridine
  modified_base 119: mod_base = OTHER; note = N1-methylpseudouridine
  modified_base 122: mod_base = OTHER; note = N1-methylpseudouridine
  modified_base 133: mod_base = OTHER; note = N1-methylpseudouridine
  modified_base 146: mod_base = OTHER; note = N1-methylpseudouridine
  modified_base 152: mod_base = OTHER; note = N1-methylpseudouridine
  modified_base 179: mod_base = OTHER; note = N1-methylpseudouridine
  modified_base 182: mod_base = OTHER; note = N1-methylpseudouridine
  modified_base 188: mod_base = OTHER; note = N1-methylpseudouridine
  modified_base 203: mod_base = OTHER; note = N1-methylpseudouridine
  modified_base 206: mod_base = OTHER; note = N1-methylpseudouridine
  modified_base 209: mod_base = OTHER; note = N1-methylpseudouridine
  modified_base 217: mod_base = OTHER; note = N1-methylpseudouridine
  modified_base 224: mod_base = OTHER; note = N1-methylpseudouridine
  modified_base 227: mod_base = OTHER; note = N1-methylpseudouridine
  modified_base 239: mod_base = OTHER; note = N1-methylpseudouridine
  modified_base 241: mod_base = OTHER; note = N1-methylpseudouridine
  modified_base 245: mod_base = OTHER; note = N1-methylpseudouridine
  modified_base 250: mod_base = OTHER; note = N1-methylpseudouridine
  modified_base 251: mod_base = OTHER; note = N1-methylpseudouridine
  modified_base 259: mod_base = OTHER; note = N1-methylpseudouridine
  modified_base 263: mod_base = OTHER; note = N1-methylpseudouridine
  modified_base 266: mod_base = OTHER; note = N1-methylpseudouridine
  modified_base 268: mod_base = OTHER; note = N1-methylpseudouridine
  modified_base 281: mod_base = OTHER; note = N1-methylpseudouridine
  modified_base 284: mod_base = OTHER; note = N1-methylpseudouridine
  modified_base 296: mod_base = OTHER; note = N1-methylpseudouridine
  modified_base 305: mod_base = OTHER; note = N1-methylpseudouridine
  modified_base 308: mod_base = OTHER; note = N1-methylpseudouridine
  modified_base 310: mod_base = OTHER; note = N1-methylpseudouridine
  modified_base 311: mod_base = OTHER; note = N1-methylpseudouridine
  modified_base 317: mod_base = OTHER; note = N1-methylpseudouridine
  modified_base 350: mod_base = OTHER; note = N1-methylpseudouridine
  modified_base 353: mod_base = OTHER; note = N1-methylpseudouridine
  modified_base 359: mod_base = OTHER; note = N1-methylpseudouridine
  modified_base 362: mod_base = OTHER; note = N1-methylpseudouridine
  modified_base 377: mod_base = OTHER; note = N1-methylpseudouridine
  modified_base 389: mod_base = OTHER; note = N1-methylpseudouridine
  modified_base 395: mod_base = OTHER; note = N1-methylpseudouridine
  modified_base 407: mod_base = OTHER; note = N1-methylpseudouridine
  modified_base 410: mod_base = OTHER; note = N1-methylpseudouridine
  modified_base 421: mod_base = OTHER; note = N1-methylpseudouridine
  modified_base 431: mod_base = OTHER; note = N1-methylpseudouridine
  modified_base 434: mod_base = OTHER; note = N1-methylpseudouridine
  modified_base 436: mod_base = OTHER; note = N1-methylpseudouridine
  modified_base 442: mod_base = OTHER; note = N1-methylpseudouridine
  modified_base 443: mod_base = OTHER; note = N1-methylpseudouridine
  modified_base 445: mod_base = OTHER; note = N1-methylpseudouridine
  modified_base 446: mod_base = OTHER; note = N1-methylpseudouridine
  modified_base 452: mod_base = OTHER; note = N1-methylpseudouridine
  modified_base 464: mod_base = OTHER; note = N1-methylpseudouridine
  modified_base 466: mod_base = OTHER; note = N1-methylpseudouridine
  modified_base 467: mod_base = OTHER; note = N1-methylpseudouridine
atgagcgaggtggagttcagccacgagtactggatgcggcacgccctgaccctggccaagcgggcccgggacgagcgggaggtgcccgtgggcgccgtgctggtgctgaacaaccgggtgatcggcgagggctggaaccgggccatcggcctgcacgaccccaccgcccacgccgagatcatggccctgcggcagggcggcctggtgatgcagaactaccggctgatcgacgccaccctgtacgtgaccttcgagccctgcgtgatgtgcgccggcgccatgatccacagccggatcggccgggtggtgttcggcgtgcggaacgccaagaccggcgccgccggcagcctgatggacgtgctgcaccaccccggcatgaaccaccgggtggagatcaccgagggcatcctggccgacgagtgcgccgccctgctgtgccggttcttccggatgccccggcgggtgttcaacgcccagaagaaggcccagagcagcaccgac

SEQ ID NO: 691 - protein, 167 aa, synthetic construct
MSEVEFSHEYWMRHALTLAKRARDEREVPVGAVLVLNNRVIGEGWNRAIGLHDPTAHAEIMALRQGGLVMQNYRLIDATLYVTFEPCVMCAGAMIHSRIGRVVFGVRNAKTGAAGSLMDVLHHPGMNHRVEITEGILADECAALLCRFFRMPRRVFNAQKKAQSSTD

SEQ ID NO: 692 - RNA, 96 nt, synthetic construct
  source 1..96: mol_type = other RNA
agcggcggcagcagcggcggcagcagcggcagcgagacacccggcaccagcgagagcgccacccccgagagcagcggcggcagcagcggcggcagc

SEQ ID NO: 693 - protein, 32 aa, synthetic construct
SGGSSGGSSGSETPGTSESATPESSGGSSGGS

SEQ ID NO: 694 - RNA, 4101 nt, synthetic construct
  source 1..4101: mol_type = other RNA
  modified_base 10: mod_base = OTHER; note = N1-methylpseudouridine
  modified_base 17: mod_base = OTHER; note = N1-methylpseudouridine
  modified_base 23: mod_base = OTHER; note = N1-methylpseudouridine
  modified_base 29: mod_base = OTHER; note = N1-methylpseudouridine
  modified_base 44: mod_base = OTHER; note = N1-methylpseudouridine
  modified_base 49: mod_base = OTHER; note = N1-methylpseudouridine
  modified_base 56: mod_base = OTHER; note = N1-methylpseudouridine
  modified_base 59: mod_base = OTHER; note = N1-methylpseudouridine
  modified_base 70: mod_base = OTHER; note = N1-methylpseudouridine
  modified_base 77: mod_base = OTHER; note = N1-methylpseudouridine
  modified_base 91: mod_base = OTHER; note = N1-methylpseudouridine
  modified_base 92: mod_base = OTHER; note = N1-methylpseudouridine
  modified_base 98: mod_base = OTHER; note = N1-methylpseudouridine
  modified_base 101: mod_base = OTHER; note = N1-methylpseudouridine
  modified_base 125: mod_base = OTHER; note = N1-methylpseudouridine
  modified_base 137: mod_base = OTHER; note = N1-methylpseudouridine
  modified_base 140: mod_base = OTHER; note = N1-methylpseudouridine
  modified_base 149: mod_base = OTHER; note = N1-methylpseudouridine
  modified_base 152: mod_base = OTHER; note = N1-methylpseudouridine
  modified_base 154: mod_base = OTHER; note = N1-methylpseudouridine
  modified_base 155: mod_base = OTHER; note = N1-methylpseudouridine
  modified_base 188: mod_base = OTHER; note = N1-methylpseudouridine
  modified_base 211: mod_base = OTHER; note = N1-methylpseudouridine
  modified_base 233: mod_base = OTHER; note = N1-methylpseudouridine
  modified_base 235: mod_base = OTHER; note = N1-methylpseudouridine
  modified_base 238: mod_base = OTHER; note = N1-methylpseudouridine
  modified_base 242: mod_base = OTHER; note = N1-methylpseudouridine
  modified_base 251: mod_base = OTHER; note = N1-methylpseudouridine
  modified_base 253: mod_base = OTHER; note = N1-methylpseudouridine
  modified_base 254: mod_base = OTHER; note = N1-methylpseudouridine
  modified_base 266: mod_base = OTHER; note = N1-methylpseudouridine
  modified_base 275: mod_base = OTHER; note = N1-methylpseudouridine
  modified_base 286: mod_base = OTHER; note = N1-methylpseudouridine
  modified_base 287: mod_base = OTHER; note = N1-methylpseudouridine
  modified_base 289: mod_base = OTHER; note = N1-methylpseudouridine
  modified_base 290: mod_base = OTHER; note = N1-methylpseudouridine
  modified_base 299: mod_base = OTHER; note = N1-methylpseudouridine
  modified_base 310: mod_base = OTHER; note = N1-methylpseudouridine
  modified_base 311: mod_base = OTHER; note = N1-methylpseudouridine
  modified_base 314: mod_base = OTHER; note = N1-methylpseudouridine
  modified_base 317: mod_base = OTHER; note = N1-methylpseudouridine
  modified_base 350: mod_base = OTHER; note = N1-methylpseudouridine
  modified_base 352: mod_base = OTHER; note = N1-methylpseudouridine
  modified_base 353: mod_base = OTHER; note = N1-methylpseudouridine
  modified_base 362: mod_base = OTHER; note = N1-methylpseudouridine
  modified_base 365: mod_base = OTHER; note = N1-methylpseudouridine
  modified_base 374: mod_base = OTHER; note = N1-methylpseudouridine
  modified_base 379: mod_base = OTHER; note = N1-methylpseudouridine
  modified_base 391: mod_base = OTHER; note = N1-methylpseudouridine
  modified_base 401: mod_base = OTHER; note = N1-methylpseudouridine
  modified_base 403: mod_base = OTHER; note = N1-methylpseudouridine
  modified_base 410: mod_base = OTHER; note = N1-methylpseudouridine
  modified_base 422: mod_base = OTHER; note = N1-methylpseudouridine
  modified_base 425: mod_base = OTHER; note = N1-methylpseudouridine
  modified_base 449: mod_base = OTHER; note = N1-methylpseudouridine
  modified_base 455: mod_base = OTHER; note = N1-methylpseudouridine
  modified_base 458: mod_base = OTHER; note = N1-methylpseudouridine
  modified_base 460: mod_base = OTHER; note = N1-methylpseudouridine
  modified_base 464: mod_base = OTHER; note = N1-methylpseudouridine
  modified_base 470: mod_base = OTHER; note = N1-methylpseudouridine
  modified_base 479: mod_base = OTHER; note = N1-methylpseudouridine
  modified_base 482: mod_base = OTHER; note = N1-methylpseudouridine
  modified_base 487: mod_base = OTHER; note = N1-methylpseudouridine
  modified_base 488: mod_base = OTHER; note = N1-methylpseudouridine
  modified_base 499: mod_base = OTHER; note = N1-methylpseudouridine
  modified_base 500: mod_base = OTHER; note = N1-methylpseudouridine
  modified_base 503: mod_base = OTHER; note = N1-methylpseudouridine
  modified_base 506: mod_base = OTHER; note = N1-methylpseudouridine
  modified_base 518: mod_base = OTHER; note = N1-methylpseudouridine
  modified_base 539: mod_base = OTHER; note = N1-methylpseudouridine
  modified_base 548: mod_base = OTHER; note = N1-methylpseudouridine
  modified_base 550: mod_base = OTHER; note = N1-methylpseudouridine
  modified_base 551: mod_base = OTHER; note = N1-methylpseudouridine
  modified_base 554: mod_base = OTHER; note = N1-methylpseudouridine
  modified_base 560: mod_base = OTHER; note = N1-methylpseudouridine
  modified_base 563: mod_base = OTHER; note = N1-methylpseudouridine
  modified_base 571: mod_base = OTHER; note = N1-methylpseudouridine
  modified_base 581: mod_base = OTHER; note = N1-methylpseudouridine
  modified_base 583: mod_base = OTHER; note = N1-methylpseudouridine
  modified_base 584: mod_base = OTHER; note = N1-methylpseudouridine
  modified_base 599: mod_base = OTHER; note = N1-methylpseudouridine
  modified_base 614: mod_base = OTHER; note = N1-methylpseudouridine
  modified_base 629: mod_base = OTHER; note = N1-methylpseudouridine
  modified_base 632: mod_base = OTHER; note = N1-methylpseudouridine
  modified_base 644: mod_base = OTHER; note = N1-methylpseudouridine
  modified_base 662: mod_base = OTHER; note = N1-methylpseudouridine
  modified_base 671: mod_base = OTHER; note = N1-methylpseudouridine
  modified_base 674: mod_base = OTHER; note = N1-methylpseudouridine
  modified_base 683: mod_base = OTHER; note = N1-methylpseudouridine
  modified_base 707: mod_base = OTHER; note = N1-methylpseudouridine
  modified_base 709: mod_base = OTHER; note = N1-methylpseudouridine
  modified_base 710: mod_base = OTHER; note = N1-methylpseudouridine
  modified_base 719: mod_base = OTHER; note = N1-methylpseudouridine
  modified_base 722: mod_base = OTHER; note = N1-methylpseudouridine
  modified_base 728: mod_base = OTHER; note = N1-methylpseudouridine
  modified_base 734: mod_base = OTHER; note = N1-methylpseudouridine
  modified_base 740: mod_base = OTHER; note = N1-methylpseudouridine
  modified_base 751: mod_base = OTHER; note = N1-methylpseudouridine
  modified_base 752: mod_base = OTHER; note = N1-methylpseudouridine
  modified_base 763: mod_base = OTHER; note = N1-methylpseudouridine
  modified_base 764: mod_base = OTHER; note = N1-methylpseudouridine
  modified_base 770: mod_base = OTHER; note = N1-methylpseudouridine
  modified_base 788: mod_base = OTHER; note = N1-methylpseudouridine
  modified_base 794: mod_base = OTHER; note = N1-methylpseudouridine
  modified_base 808: mod_base = OTHER; note = N1-methylpseudouridine
  modified_base 821: mod_base = OTHER; note = N1-methylpseudouridine
  modified_base 830: mod_base = OTHER; note = N1-methylpseudouridine
  modified_base 833: mod_base = OTHER; note = N1-methylpseudouridine
  modified_base 842: mod_base = OTHER; note = N1-methylpseudouridine
  modified_base 853: mod_base = OTHER; note = N1-methylpseudouridine
  modified_base 863: mod_base = OTHER; note = N1-methylpseudouridine
  modified_base 865: mod_base = OTHER; note = N1-methylpseudouridine
  modified_base 866: mod_base = OTHER; note = N1-methylpseudouridine
  modified_base 869: mod_base = OTHER; note = N1-methylpseudouridine
  modified_base 884: mod_base = OTHER; note = N1-methylpseudouridine
  modified_base 896: mod_base = OTHER; note = N1-methylpseudouridine
  modified_base 899: mod_base = OTHER; note = N1-methylpseudouridine
  modified_base 902: mod_base = OTHER; note = N1-methylpseudouridine
  modified_base 911: mod_base = OTHER; note = N1-methylpseudouridine
  modified_base 914: mod_base = OTHER; note = N1-methylpseudouridine
  modified_base 920: mod_base = OTHER; note = N1-methylpseudouridine
  modified_base 932: mod_base = OTHER; note = N1-methylpseudouridine
  modified_base 947: mod_base = OTHER; note = N1-methylpseudouridine
  modified_base 959: mod_base = OTHER; note = N1-methylpseudouridine
  modified_base 962: mod_base = OTHER; note = N1-methylpseudouridine
  modified_base 970: mod_base = OTHER; note = N1-methylpseudouridine
  modified_base 992: mod_base = OTHER; note = N1-methylpseudouridine
  modified_base 998: mod_base = OTHER; note = N1-methylpseudouridine
  modified_base 1001: mod_base = OTHER; note = N1-methylpseudouridine
  modified_base 1010: mod_base = OTHER; note = N1-methylpseudouridine
  modified_base 1013: mod_base = OTHER; note = N1-methylpseudouridine
  modified_base 1025: mod_base = OTHER; note = N1-methylpseudouridine
  modified_base 1036: mod_base = OTHER; note = N1-methylpseudouridine
  modified_base 1046: mod_base = OTHER; note = N1-methylpseudouridine
  modified_base 1048: mod_base = OTHER; note = N1-methylpseudouridine
  modified_base 1049: mod_base = OTHER; note = N1-methylpseudouridine
  modified_base 1051: mod_base = OTHER; note = N1-methylpseudouridine
  modified_base 1052: mod_base = OTHER; note = N1-methylpseudouridine
  modified_base 1072: mod_base = OTHER; note = N1-methylpseudouridine
  modified_base 1081: mod_base = OTHER; note = N1-methylpseudouridine
  modified_base 1085: mod_base = OTHER; note = N1-methylpseudouridine
  modified_base 1111: mod_base = OTHER; note = N1-methylpseudouridine
  modified_base 1112: mod_base = OTHER; note = N1-methylpseudouridine
  modified_base 1114: mod_base = OTHER; note = N1-methylpseudouridine
  modified_base 1120: mod_base = OTHER; note = N1-methylpseudouridine
  modified_base 1121: mod_base = OTHER; note = N1-methylpseudouridine
  modified_base 1124: mod_base = OTHER; note = N1-methylpseudouridine
  modified_base 1133: mod_base = OTHER; note = N1-methylpseudouridine
  modified_base 1136: mod_base = OTHER; note = N1-methylpseudouridine
  modified_base 1145: mod_base = OTHER; note = N1-methylpseudouridine
  modified_base 1163: mod_base = OTHER; note = N1-methylpseudouridine
  modified_base 1166: mod_base = OTHER; note = N1-methylpseudouridine
  modified_base 1169: mod_base = OTHER; note = N1-methylpseudouridine
  modified_base 1175: mod_base = OTHER; note = N1-methylpseudouridine
  modified_base 1190: mod_base = OTHER; note = N1-methylpseudouridine
  modified_base 1193: mod_base = OTHER; note = N1-methylpseudouridine
  modified_base 1210: mod_base = OTHER; note = N1-methylpseudouridine
  modified_base 1211: mod_base = OTHER; note = N1-methylpseudouridine
  modified_base 1226: mod_base = OTHER; note = N1-methylpseudouridine
  modified_base 1238: mod_base = OTHER; note = N1-methylpseudouridine
  modified_base 1244: mod_base = OTHER; note = N1-methylpseudouridine
  modified_base 1253: mod_base = OTHER; note = N1-methylpseudouridine
  modified_base 1262: mod_base = OTHER; note = N1-methylpseudouridine
  modified_base 1265: mod_base = OTHER; note = N1-methylpseudouridine
  modified_base 1282: mod_base = OTHER; note = N1-methylpseudouridine
  modified_base 1283: mod_base = OTHER; note = N1-methylpseudouridine
  modified_base 1285: mod_base = OTHER; note = N1-methylpseudouridine
  modified_base 1291: mod_base = OTHER; note = N1-methylpseudouridine
  modified_base 1292: mod_base = OTHER; note = N1-methylpseudouridine
  modified_base 1295: mod_base = OTHER; note = N1-methylpseudouridine
  modified_base 1316: mod_base = OTHER; note = N1-methylpseudouridine
  modified_base 1325: mod_base = OTHER; note = N1-methylpseudouridine
  modified_base 1328: mod_base = OTHER; note = N1-methylpseudouridine
  modified_base 1333: mod_base = OTHER; note = N1-methylpseudouridine
  modified_base 1334: mod_base = OTHER; note = N1-methylpseudouridine
  modified_base 1340: mod_base = OTHER; note = N1-methylpseudouridine
  modified_base 1345: mod_base = OTHER; note = N1-methylpseudouridine
  modified_base 1348: mod_base = OTHER; note = N1-methylpseudouridine
  modified_base 1352: mod_base = OTHER; note = N1-methylpseudouridine
  modified_base 1361: mod_base = OTHER; note = N1-methylpseudouridine
  modified_base 1381: mod_base = OTHER; note = N1-methylpseudouridine
  modified_base 1382: mod_base = OTHER; note = N1-methylpseudouridine
  modified_base 1387: mod_base = OTHER; note = N1-methylpseudouridine
  modified_base 1391: mod_base = OTHER; note = N1-methylpseudouridine
  modified_base 1415: mod_base = OTHER; note = N1-methylpseudouridine
  modified_base 1423: mod_base = OTHER; note = N1-methylpseudouridine
  modified_base 1429: mod_base = OTHER; note = N1-methylpseudouridine
  modified_base 1430: mod_base = OTHER; note = N1-methylpseudouridine
  modified_base 1439: mod_base = OTHER; note = N1-methylpseudouridine
  modified_base 1442: mod_base = OTHER; note = N1-methylpseudouridine
  modified_base 1468: mod_base = OTHER; note = N1-methylpseudouridine
  modified_base 1469: mod_base = OTHER; note = N1-methylpseudouridine
  modified_base 1472: mod_base = OTHER; note = N1-methylpseudouridine
  modified_base 1481: mod_base = OTHER; note = N1-methylpseudouridine
  modified_base 1489: mod_base = OTHER; note = N1-methylpseudouridine
  modified_base 1490: mod_base = OTHER; note = N1-methylpseudouridine
  modified_base 1502: mod_base = OTHER; note = N1-methylpseudouridine
  modified_base 1517: mod_base = OTHER; note = N1-methylpseudouridine
  modified_base 1520: mod_base = OTHER; note = N1-methylpseudouridine
  modified_base 1535: mod_base = OTHER; note = N1-methylpseudouridine
  modified_base 1538: mod_base = OTHER; note = N1-methylpseudouridine
  modified_base 1540: mod_base = OTHER; note = N1-methylpseudouridine
  modified_base 1546: mod_base = OTHER; note = N1-methylpseudouridine
  modified_base 1549: mod_base = OTHER; note = N1-methylpseudouridine
  modified_base 1550: mod_base = OTHER; note = N1-methylpseudouridine
  modified_base 1556: mod_base = OTHER; note = N1-methylpseudouridine
  modified_base 1558: mod_base = OTHER; note = N1-methylpseudouridine
  modified_base 1568: mod_base = OTHER; note = N1-methylpseudouridine
  modified_base 1577: mod_base = OTHER; note = N1-methylpseudouridine
  modified_base 1582: mod_base = OTHER; note = N1-methylpseudouridine
  modified_base 1586: mod_base = OTHER; note = N1-methylpseudouridine
  modified_base 1598: mod_base = OTHER; note = N1-methylpseudouridine
  modified_base 1612: mod_base = OTHER; note = N1-methylpseudouridine
  modified_base 1613: mod_base = OTHER; note = N1-methylpseudouridine
  modified_base 1616: mod_base = OTHER; note = N1-methylpseudouridine
  modified_base 1640: mod_base = OTHER; note = N1-methylpseudouridine
  modified_base 1643: mod_base = OTHER; note = N1-methylpseudouridine
  modified_base 1649: mod_base = OTHER; note = N1-methylpseudouridine
  modified_base 1652: mod_base = OTHER; note = N1-methylpseudouridine
  modified_base 1654: mod_base = OTHER; note = N1-methylpseudouridine
  modified_base 1655: mod_base = OTHER; note = N1-methylpseudouridine
  modified_base 1673: mod_base = OTHER; note = N1-methylpseudouridine
  modified_base 1679: mod_base = OTHER; note = N1-methylpseudouridine
  modified_base 1688: mod_base = OTHER; note = N1-methylpseudouridine
  modified_base 1699: mod_base = OTHER; note = N1-methylpseudouridine
  modified_base 1702: mod_base = OTHER; note = N1-methylpseudouridine
  modified_base 1703: mod_base = OTHER; note = N1-methylpseudouridine
  modified_base 1712: mod_base = OTHER; note = N1-methylpseudouridine
  modified_base 1717: mod_base = OTHER; note = N1-methylpseudouridine
  modified_base 1720: mod_base = OTHER; note = N1-methylpseudouridine
  modified_base 1721: mod_base = OTHER; note = N1-methylpseudouridine
  modified_base 1730: mod_base = OTHER; note = N1-methylpseudouridine
  modified_base 1736: mod_base = OTHER; note = N1-methylpseudouridine
  modified_base 1745: mod_base = OTHER; note = N1-methylpseudouridine
  modified_base 1756: mod_base = OTHER; note = N1-methylpseudouridine
  modified_base 1757: mod_base = OTHER; note = N1-methylpseudouridine
  modified_base 1769: mod_base = OTHER; note = N1-methylpseudouridine
  modified_base 1777: mod_base = OTHER; note = N1-methylpseudouridine
  modified_base 1787: mod_base = OTHER; note = N1-methylpseudouridine
  modified_base 1790: mod_base = OTHER; note = N1-methylpseudouridine
  modified_base 1796: mod_base = OTHER; note = N1-methylpseudouridine
  modified_base 1799: mod_base = OTHER; note = N1-methylpseudouridine
  modified_base 1813: mod_base = OTHER; note = N1-methylpseudouridine
  modified_base 1814: mod_base = OTHER; note = N1-methylpseudouridine
  modified_base 1817: mod_base = OTHER; note = N1-methylpseudouridine
  modified_base 1841: mod_base = OTHER; note = N1-methylpseudouridine
  modified_base 1844: mod_base = OTHER; note = N1-methylpseudouridine
  modified_base 1853: mod_base = OTHER; note = N1-methylpseudouridine
  modified_base 1856: mod_base = OTHER; note = N1-methylpseudouridine
  modified_base 1859: mod_base = OTHER; note = N1-methylpseudouridine
  modified_base 1865: mod_base = OTHER; note = N1-methylpseudouridine
  modified_base 1871: mod_base = OTHER; note = N1-methylpseudouridine
  modified_base 1873: mod_base = OTHER; note = N1-methylpseudouridine
  modified_base 1874: mod_base = OTHER; note = N1-methylpseudouridine
  modified_base 1889: mod_base = OTHER; note = N1-methylpseudouridine
  modified_base 1892: mod_base = OTHER; note = N1-methylpseudouridine
  modified_base 1904: mod_base = OTHER; note = N1-methylpseudouridine
  modified_base 1912: mod_base = OTHER; note = N1-methylpseudouridine
  modified_base 1922: mod_base = OTHER; note = N1-methylpseudouridine
  modified_base 1924: mod_base = OTHER; note = N1-methylpseudouridine
  modified_base 1925: mod_base = OTHER; note = N1-methylpseudouridine
  modified_base 1937: mod_base = OTHER; note = N1-methylpseudouridine
  modified_base 1940: mod_base = OTHER; note = N1-methylpseudouridine
  modified_base 1949: mod_base = OTHER; note = N1-methylpseudouridine
  modified_base 1963: mod_base = OTHER; note = N1-methylpseudouridine
  modified_base 1972: mod_base = OTHER; note = N1-methylpseudouridine
  modified_base 1982: mod_base = OTHER; note = N1-methylpseudouridine
  modified_base 1994: mod_base = OTHER; note = N1-methylpseudouridine
  modified_base 1997: mod_base = OTHER; note = N1-methylpseudouridine
  modified_base 2006: mod_base = OTHER; note = N1-methylpseudouridine
  modified_base 2033: mod_base = OTHER; note = N1-methylpseudouridine
  modified_base 2036: mod_base = OTHER; note = N1-methylpseudouridine
  modified_base 2041: mod_base = OTHER; note = N1-methylpseudouridine
  modified_base 2042: mod_base = OTHER; note = N1-methylpseudouridine
  modified_base 2045: mod_base = OTHER; note = N1-methylpseudouridine
  modified_base 2059: mod_base = OTHER; note = N1-methylpseudouridine
  modified_base 2060: mod_base = OTHER; note = N1-methylpseudouridine
  modified_base 2074: mod_base = OTHER; note = N1-methylpseudouridine
  modified_base 2075: mod_base = OTHER; note = N1-methylpseudouridine
  modified_base 2078: mod_base = OTHER; note = N1-methylpseudouridine
  modified_base 2084: mod_base = OTHER; note = N1-methylpseudouridine
  modified_base 2087: mod_base = OTHER; note = N1-methylpseudouridine
  modified_base 2102: mod_base = OTHER; note = N1-methylpseudouridine
  modified_base 2107: mod_base = OTHER; note = N1-methylpseudouridine
  modified_base 2108: mod_base = OTHER; note = N1-methylpseudouridine
  modified_base 2120: mod_base = OTHER; note = N1-methylpseudouridine
  modified_base 2135: mod_base = OTHER; note = N1-methylpseudouridine
  modified_base 2156: mod_base = OTHER; note = N1-methylpseudouridine
  modified_base 2168: mod_base = OTHER; note = N1-methylpseudouridine
  modified_base 2177: mod_base = OTHER; note = N1-methylpseudouridine
  modified_base 2195: mod_base = OTHER; note = N1-methylpseudouridine
  modified_base 2207: mod_base = OTHER; note = N1-methylpseudouridine
  modified_base 2210: mod_base = OTHER; note = N1-methylpseudouridine
  modified_base 2219: mod_base = OTHER; note = N1-methylpseudouridine
  modified_base 2225: mod_base = OTHER; note = N1-methylpseudouridine
  modified_base 2228: mod_base = OTHER; note = N1-methylpseudouridine
  modified_base 2237: mod_base = OTHER; note = N1-methylpseudouridine
  modified_base 2240: mod_base = OTHER; note = N1-methylpseudouridine
  modified_base 2246: mod_base = OTHER; note = N1-methylpseudouridine
  modified_base 2249: mod_base = OTHER; note = N1-methylpseudouridine
  modified_base 2273: mod_base = OTHER; note = N1-methylpseudouridine
  modified_base 2276: mod_base = OTHER; note = N1-methylpseudouridine
  modified_base 2279: mod_base = OTHER; note = N1-methylpseudouridine
  modified_base 2285: mod_base = OTHER; note = N1-methylpseudouridine
  modified_base 2339: mod_base = OTHER; note = N1-methylpseudouridine
  modified_base 2348: mod_base = OTHER; note = N1-methylpseudouridine
  modified_base 2360: mod_base = OTHER; note = N1-methylpseudouridine
  modified_base 2369: mod_base = OTHER; note = N1-methylpseudouridine
  modified_base 2381: mod_base = OTHER; note = N1-methylpseudouridine
  modified_base 2384: mod_base = OTHER; note = N1-methylpseudouridine
  modified_base 2399: mod_base = OTHER; note = N1-methylpseudouridine
  modified_base 2414: mod_base = OTHER; note = N1-methylpseudouridine
  modified_base 2429: mod_base = OTHER; note = N1-methylpseudouridine
  modified_base 2431: mod_base = OTHER; note = N1-methylpseudouridine
  modified_base 2435: mod_base = OTHER; note = N1-methylpseudouridine
  modified_base 2437: mod_base = OTHER; note = N1-methylpseudouridine
  modified_base 2440: mod_base = OTHER; note = N1-methylpseudouridine
  modified_base 2444: mod_base = OTHER; note = N1-methylpseudouridine
  modified_base 2462: mod_base = OTHER; note = N1-methylpseudouridine
  modified_base 2464: mod_base = OTHER; note = N1-methylpseudouridine
  modified_base 2468: mod_base = OTHER; note = N1-methylpseudouridine
  modified_base 2480: mod_base = OTHER; note = N1-methylpseudouridine
  modified_base 2486: mod_base = OTHER; note = N1-methylpseudouridine
  modified_base 2495: mod_base = OTHER; note = N1-methylpseudouridine
  modified_base 2503: mod_base = OTHER; note = N1-methylpseudouridine
  modified_base 2510: mod_base = OTHER; note = N1-methylpseudouridine
  modified_base 2519: mod_base = OTHER; note = N1-methylpseudouridine
  modified_base 2522: mod_base = OTHER; note = N1-methylpseudouridine
  modified_base 2533: mod_base = OTHER; note = N1-methylpseudouridine
  modified_base 2534: mod_base = OTHER; note = N1-methylpseudouridine
  modified_base 2537: mod_base = OTHER; note = N1-methylpseudouridine
  modified_base 2552: mod_base = OTHER; note = N1-methylpseudouridine
  modified_base 2564: mod_base = OTHER; note = N1-methylpseudouridine
  modified_base 2567: mod_base = OTHER; note = N1-methylpseudouridine
  modified_base 2606: mod_base = OTHER; note = N1-methylpseudouridine
  modified_base 2621: mod_base = OTHER; note = N1-methylpseudouridine
  modified_base 2624: mod_base = OTHER; note = N1-methylpseudouridine
  modified_base 2633: mod_base = OTHER; note = N1-methylpseudouridine
  modified_base 2641: mod_base = OTHER; note = N1-methylpseudouridine
  modified_base 2644: mod_base = OTHER; note = N1-methylpseudouridine
  modified_base 2654: mod_base = OTHER; note = N1-methylpseudouridine
  modified_base 2657: mod_base = OTHER; note = N1-methylpseudouridine
  modified_base 2669: mod_base = OTHER; note = N1-methylpseudouridine
  modified_base 2672: mod_base = OTHER; note = N1-methylpseudouridine
  modified_base 2686: mod_base = OTHER; note = N1-methylpseudouridine
  modified_base 2687: mod_base = OTHER; note = N1-methylpseudouridine
  modified_base 2696: mod_base = OTHER; note = N1-methylpseudouridine
  modified_base 2720: mod_base = OTHER; note = N1-methylpseudouridine
  modified_base 2729: mod_base = OTHER; note = N1-methylpseudouridine
  modified_base 2743: mod_base = OTHER; note = N1-methylpseudouridine
  modified_base 2744: mod_base = OTHER; note = N1-methylpseudouridine
  modified_base 2747: mod_base = OTHER; note = N1-methylpseudouridine
  modified_base 2759: mod_base = OTHER; note = N1-methylpseudouridine
  modified_base 2762: mod_base = OTHER; note = N1-methylpseudouridine
  modified_base 2777: mod_base = OTHER; note = N1-methylpseudouridine
  modified_base 2789: mod_base = OTHER; note = N1-methylpseudouridine
  modified_base 2798: mod_base = OTHER; note = N1-methylpseudouridine
  modified_base 2801: mod_base = OTHER; note = N1-methylpseudouridine
  modified_base 2813: mod_base = OTHER; note = N1-methylpseudouridine
  modified_base 2824: mod_base = OTHER; note = N1-methylpseudouridine
  modified_base 2843: mod_base = OTHER; note = N1-methylpseudouridine
  modified_base 2846: mod_base = OTHER; note = N1-methylpseudouridine
  modified_base 2855: mod_base = OTHER; note = N1-methylpseudouridine
  modified_base 2861: mod_base = OTHER; note = N1-methylpseudouridine
  modified_base 2864: mod_base = OTHER; note = N1-methylpseudouridine
  modified_base 2870: mod_base = OTHER; note = N1-methylpseudouridine
  modified_base 2882: mod_base = OTHER; note = N1-methylpseudouridine
  modified_base 2885: mod_base = OTHER; note = N1-methylpseudouridine
  modified_base 2893: mod_base = OTHER; note = N1-methylpseudouridine
  modified_base 2894: mod_base = OTHER; note = N1-methylpseudouridine
  modified_base 2905: mod_base = OTHER; note = N1-methylpseudouridine
  modified_base 2906: mod_base = OTHER; note = N1-methylpseudouridine
  modified_base 2911: mod_base = OTHER; note = N1-methylpseudouridine
  modified_base 2912: mod_base = OTHER; note = N1-methylpseudouridine
  modified_base 2914: mod_base = OTHER; note = N1-methylpseudouridine
  modified_base 2921: mod_base = OTHER; note = N1-methylpseudouridine
  modified_base 2930: mod_base = OTHER; note = N1-methylpseudouridine
  modified_base 2938: mod_base = OTHER; note = N1-methylpseudouridine
  modified_base 2959: mod_base = OTHER; note = N1-methylpseudouridine
  modified_base 2963: mod_base = OTHER; note = N1-methylpseudouridine
  modified_base 2972: mod_base = OTHER; note = N1-methylpseudouridine
  modified_base 2975: mod_base = OTHER; note = N1-methylpseudouridine
  modified_base 2987: mod_base = OTHER; note = N1-methylpseudouridine
  modified_base 2990: mod_base = OTHER; note = N1-methylpseudouridine
  modified_base 2998: mod_base = OTHER; note = N1-methylpseudouridine
  modified_base 3008: mod_base = OTHER; note = N1-methylpseudouridine
  modified_base 3019: mod_base = OTHER; note = N1-methylpseudouridine
  modified_base 3020: mod_base = OTHER; note = N1-methylpseudouridine
  modified_base 3023: mod_base = OTHER; note = N1-methylpseudouridine
  modified_base 3025: mod_base = OTHER; note = N1-methylpseudouridine
  modified_base 3034: mod_base = OTHER; note = N1-methylpseudouridine
  modified_base 3041: mod_base = OTHER; note = N1-methylpseudouridine
  modified_base 3043: mod_base = OTHER; note = N1-methylpseudouridine
  modified_base 3050: mod_base = OTHER; note = N1-methylpseudouridine
  modified_base 3059: mod_base = OTHER; note = N1-methylpseudouridine
  modified_base 3062: mod_base = OTHER; note = N1-methylpseudouridine
  modified_base 3083: mod_base = OTHER; note = N1-methylpseudouridine
  modified_base 3103: mod_base = OTHER; note = N1-methylpseudouridine
  modified_base 3106: mod_base = OTHER; note = N1-methylpseudouridine
  modified_base 3107: mod_base = OTHER; note = N1-methylpseudouridine
  modified_base 3109: mod_base = OTHER; note = N1-methylpseudouridine
  modified_base 3110: mod_base = OTHER; note = N1-methylpseudouridine
  modified_base 3112: mod_base = OTHER; note = N1-methylpseudouridine
  modified_base 3122: mod_base = OTHER; note = N1-methylpseudouridine
  modified_base 3125: mod_base = OTHER; note = N1-methylpseudouridine
  modified_base 3130: mod_base = OTHER; note = N1-methylpseudouridine
  modified_base 3131: mod_base = OTHER; note = N1-methylpseudouridine
  modified_base 3133: mod_base = OTHER; note = N1-methylpseudouridine
  modified_base 3134: mod_base = OTHER; note = N1-methylpseudouridine
  modified_base 3146: mod_base = OTHER; note = N1-methylpseudouridine
  modified_base 3152: mod_base = OTHER; note = N1-methylpseudouridine
  modified_base 3167: mod_base = OTHER; note = N1-methylpseudouridine
  modified_base 3182: mod_base = OTHER; note = N1-methylpseudouridine
  modified_base 3185: mod_base = OTHER; note = N1-methylpseudouridine
  modified_base 3212: mod_base = OTHER; note = N1-methylpseudouridine
  modified_base 3215: mod_base = OTHER; note = N1-methylpseudouridine
  modified_base 3217: mod_base = OTHER; note = N1-methylpseudouridine
  modified_base 3235: mod_base = OTHER; note = N1-methylpseudouridine
  modified_base 3236: mod_base = OTHER; note = N1-methylpseudouridine
  modified_base 3245: mod_base = OTHER; note = N1-methylpseudouridine
  modified_base 3254: mod_base = OTHER; note = N1-methylpseudouridine
  modified_base 3257: mod_base = OTHER; note = N1-methylpseudouridine
  modified_base 3263: mod_base = OTHER; note = N1-methylpseudouridine
  modified_base 3272: mod_base = OTHER; note = N1-methylpseudouridine
  modified_base 3278: mod_base = OTHER; note = N1-methylpseudouridine
  modified_base 3281: mod_base = OTHER; note = N1-methylpseudouridine
  modified_base 3296: mod_base = OTHER; note = N1-methylpseudouridine
  modified_base 3310: mod_base = OTHER; note = N1-methylpseudouridine
  modified_base 3311: mod_base = OTHER; note = N1-methylpseudouridine
  modified_base 3326: mod_base = OTHER; note = N1-methylpseudouridine
  modified_base 3329: mod_base = OTHER; note = N1-methylpseudouridine
  modified_base 3353: mod_base = OTHER; note = N1-methylpseudouridine
  modified_base 3356: mod_base = OTHER; note = N1-methylpseudouridine
  modified_base 3373: mod_base = OTHER; note = N1-methylpseudouridine
  modified_base 3388: mod_base = OTHER; note = N1-methylpseudouridine
  modified_base 3397: mod_base = OTHER; note = N1-methylpseudouridine
  modified_base 3398: mod_base = OTHER; note = N1-methylpseudouridine
  modified_base 3413: mod_base = OTHER; note = N1-methylpseudouridine
  modified_base 3418: mod_base = OTHER; note = N1-methylpseudouridine
  modified_base 3425: mod_base = OTHER; note = N1-methylpseudouridine
  modified_base 3428: mod_base = OTHER; note = N1-methylpseudouridine
  modified_base 3431: mod_base = OTHER; note = N1-methylpseudouridine
  modified_base 3434: mod_base = OTHER; note = N1-methylpseudouridine
  modified_base 3443: mod_base = OTHER; note = N1-methylpseudouridine
  modified_base 3467: mod_base = OTHER; note = N1-methylpseudouridine
  modified_base 3476: mod_base = OTHER; note = N1-methylpseudouridine
  modified_base 3485: mod_base = OTHER; note = N1-methylpseudouridine
  modified_base 3488: mod_base = OTHER; note = N1-methylpseudouridine
  modified_base 3494: mod_base = OTHER; note = N1-methylpseudouridine
  modified_base 3500: mod_base = OTHER; note = N1-methylpseudouridine
  modified_base 3503: mod_base = OTHER; note = N1-methylpseudouridine
  modified_base 3517: mod_base = OTHER; note = N1-methylpseudouridine
  modified_base 3518: mod_base = OTHER; note = N1-methylpseudouridine
  modified_base 3533: mod_base = OTHER; note = N1-methylpseudouridine
  modified_base 3538: mod_base = OTHER; note = N1-methylpseudouridine
  modified_base 3539: mod_base = OTHER; note = N1-methylpseudouridine
  modified_base 3542: mod_base = OTHER; note = N1-methylpseudouridine
  modified_base 3556: mod_base = OTHER; note = N1-methylpseudouridine
  modified_base 3566: mod_base = OTHER; note = N1-methylpseudouridine
  modified_base 3578: mod_base = OTHER; note = N1-methylpseudouridine
  modified_base 3581: mod_base = OTHER; note = N1-methylpseudouridine
  modified_base 3584: mod_base = OTHER; note = N1-methylpseudouridine
  modified_base 3590: mod_base = OTHER; note = N1-methylpseudouridine
  modified_base 3598: mod_base = OTHER; note = N1-methylpseudouridine
  modified_base 3605: mod_base = OTHER; note = N1-methylpseudouridine
  modified_base 3607: mod_base = OTHER; note = N1-methylpseudouridine
  modified_base 3608: mod_base = OTHER; note = N1-methylpseudouridine
  modified_base 3614: mod_base = OTHER; note = N1-methylpseudouridine
  modified_base 3635: mod_base = OTHER; note = N1-methylpseudouridine
  modified_base 3638: mod_base = OTHER; note = N1-methylpseudouridine
  modified_base 3656: mod_base = OTHER; note = N1-methylpseudouridine
  modified_base 3674: mod_base = OTHER; note = N1-methylpseudouridine
  modified_base 3680: mod_base = OTHER; note = N1-methylpseudouridine
  modified_base 3691: mod_base = OTHER; note = N1-methylpseudouridine
  modified_base 3695: mod_base = OTHER; note = N1-methylpseudouridine
  modified_base 3700: mod_base = OTHER; note = N1-methylpseudouridine
  modified_base 3701: mod_base = OTHER; note = N1-methylpseudouridine
  modified_base 3704: mod_base = OTHER; note = N1-methylpseudouridine
  modified_base 3706: mod_base = OTHER; note = N1-methylpseudouridine
  modified_base 3710: mod_base = OTHER; note = N1-methylpseudouridine
  modified_base 3721: mod_base = OTHER; note = N1-methylpseudouridine
  modified_base 3731: mod_base = OTHER; note = N1-methylpseudouridine
  modified_base 3767: mod_base = OTHER; note = N1-methylpseudouridine
  modified_base 3769: mod_base = OTHER; note = N1-methylpseudouridine
  modified_base 3770: mod_base = OTHER; note = N1-methylpseudouridine
  modified_base 3773: mod_base = OTHER; note = N1-methylpseudouridine
  modified_base 3790: mod_base = OTHER; note = N1-methylpseudouridine
  modified_base 3794: mod_base = OTHER; note = N1-methylpseudouridine
  modified_base 3803: mod_base = OTHER; note = N1-methylpseudouridine
  modified_base 3806: mod_base = OTHER; note = N1-methylpseudouridine
  modified_base 3815: mod_base = OTHER; note = N1-methylpseudouridine
  modified_base 3823: mod_base = OTHER; note = N1-methylpseudouridine
  modified_base 3824: mod_base = OTHER; note = N1-methylpseudouridine
  modified_base 3836: mod_base = OTHER; note = N1-methylpseudouridine
  modified_base 3839: mod_base = OTHER; note = N1-methylpseudouridine
  modified_base 3842: mod_base = OTHER; note = N1-methylpseudouridine
  modified_base 3857: mod_base = OTHER; note = N1-methylpseudouridine
  modified_base 3866: mod_base = OTHER; note = N1-methylpseudouridine
  modified_base 3869: mod_base = OTHER; note = N1-methylpseudouridine
  modified_base 3877: mod_base = OTHER; note = N1-methylpseudouridine
  modified_base 3902: mod_base = OTHER; note = N1-methylpseudouridine
  modified_base 3923: mod_base = OTHER; note = N1-methylpseudouridine
  modified_base 3926: mod_base = OTHER; note = N1-methylpseudouridine
  modified_base 3932: mod_base = OTHER; note = N1-methylpseudouridine
  modified_base 3934: mod_base = OTHER; note = N1-methylpseudouridine
  modified_base 3935: mod_base = OTHER; note = N1-methylpseudouridine
  modified_base 3941: mod_base = OTHER; note = N1-methylpseudouridine
  modified_base 3950: mod_base = OTHER; note = N1-methylpseudouridine
  modified_base 3967: mod_base = OTHER; note = N1-methylpseudouridine
  modified_base 3968: mod_base = OTHER; note = N1-methylpseudouridine
  modified_base 3973: mod_base = OTHER; note = N1-methylpseudouridine
  modified_base 3976: mod_base = OTHER; note = N1-methylpseudouridine
  modified_base 3977: mod_base = OTHER; note = N1-methylpseudouridine
  modified_base 3989: mod_base = OTHER; note = N1-methylpseudouridine
  modified_base 4003: mod_base = OTHER; note = N1-methylpseudouridine
  modified_base 4022: mod_base = OTHER; note = N1-methylpseudouridine
  modified_base 4025: mod_base = OTHER; note = N1-methylpseudouridine
  modified_base 4037: mod_base = OTHER; note = N1-methylpseudouridine
  modified_base 4040: mod_base = OTHER; note = N1-methylpseudouridine
  modified_base 4052: mod_base = OTHER; note = N1-methylpseudouridine
  modified_base 4061: mod_base = OTHER; note = N1-methylpseudouridine
  modified_base 4063: mod_base = OTHER; note = N1-methylpseudouridine
  modified_base 4076: mod_base = OTHER; note = N1-methylpseudouridine
  modified_base 4082: mod_base = OTHER; note = N1-methylpseudouridine
  modified_base 4091: mod_base = OTHER; note = N1-methylpseudouridine
gacaagaagtacagcatcggcctggccatcggcaccaacagcgtgggctgggccgtgatcaccgacgagtacaaggtgcccagcaagaagttcaaggtgctgggcaacaccgaccggcacagcatcaagaagaacctgatcggcgccctgctgttcgacagcggcgagacagccgaggccacccggctgaagcggaccgcccggcggcggtacacccggcggaagaaccggatctgctacctgcaggagatcttcagcaacgagatggccaaggtggacgacagcttcttccaccggctggaggagagcttcctggtggaggaggacaagaagcacgagcggcaccccatcttcggcaacatcgtggacgaggtggcctaccacgagaagtaccccaccatctaccacctgcggaagaagctggtggacagcaccgacaaggccgacctgcggctgatctacctggccctggcccacatgatcaagttccggggccacttcctgatcgagggcgacctgaaccccgacaacagcgacgtggacaagctgttcatccagctggtgcagacctacaaccagctgttcgaggagaaccccatcaacgccagcggcgtggacgccaaggccatcctgagcgcccggctgagcaagagccggcggctggagaacctgatcgcccagctgcccggcgagaagaagaacggcctgttcggcaacctgatcgccctgagcctgggcctgacccccaacttcaagagcaacttcgacctggccgaggacgccaagctgcagctgagcaaggacacctacgacgacgacctggacaacctgctggcccagatcggcgaccagtacgccgacctgttcctggccgccaagaacctgagcgacgccatcctgctgagcgacatcctgcgggtgaacaccgagatcaccaaggcccccctgagcgccagcatgatcaagcggtacgacgagcaccaccaggacctgaccctgctgaaggccctggtgcggcagcagctgcccgagaagtacaaggagatcttcttcgaccagagcaagaacggctacgccggctacatcgacggcggcgccagccaggaggagttctacaagttcatcaagcccatcctggagaagatggacggcaccgaggagctgctggtgaagctgaaccgggaggacctgctgcggaagcagcggaccttcgacaacggcagcatcccccaccagatccacctgggcgagctgcacgccatcctgcggcggcaggaggacttctaccccttcctgaaggacaaccgggagaagatcgagaagatcctgaccttccggatcccctactacgtgggccccctggcccggggcaacagccggttcgcctggatgacccgcaagagcgaggagacaatcaccccctggaacttcgaggaggtggtggacaagggcgccagcgcccagagcttcatcgagcggatgaccaacttcgacaagaacctgcccaacgagaaggtgctgcccaagcacagcctgctgtacgagtacttcaccgtgtacaacgagctgaccaaggtgaagtacgtgaccgagggcatgcggaagcccgccttcctgagcggcgagcagaagaaggccatcgtggacctgctgttcaagaccaaccggaaggtgaccgtgaagcagctgaaggaggactacttcaagaagatcgagtgcttcgacagcgtggagatcagcggcgtggaggaccggttcaacgccagcctgggcacctaccacgacctgctgaagatcatcaaggacaaggacttcctggacaacgaggagaacgaggacatcctggaggacatcgtgctgaccctgaccctgttcgaggaccgggagatgatcgaggagcggctgaagacctacgcccacctgttcgacgacaaggtgatgaagcagctgaagcggcggcggtacaccggctggggccggctgagccggaagctgatcaacggcatccgggacaagcagagcggcaagaccatcctggacttcctcaagagcgacggcttcgccaaccggaacttcatgcagctgatccacgacgacagcctgaccttcaaggaggacatccagaaggcccaggtgagcggccagggcgacagcctgcacgagcacatcgccaacctggccggcagccccgccatcaagaagggcatcctgcagaccgtgaaggtggtggacgagctggtgaaggtgatgggccggcacaagcccgagaacatcgtgatcgagatggcccgggagaaccagaccacccagaagggccagaagaacagccgggagcggatgaagcggatcgaggagggcatcaaggagctgggcagccagatcctgaaggagcaccccgtggagaacacccagctgcagaacgagaagctgtacctgtactacctgcagaacggccgggacatgtacgtggaccaggagctggacatcaaccggctgagcgactacgacgtggaccacatcgtgccccagagcttcctgaaggacgacagcatcgacaacaaggtgctgacccggagcgacaagaaccggggcaagagcgacaacgtgcccagcgaggaggtggtgaagaagatgaagaactactggcggcagctgctgaacgccaagctgatcacccagcggaagttcgacaacctgaccaaggccgagcggggcggcctgagcgagctggacaaggccggcttcatcaagcggcagctggtggagacacggcagatcaccaagcacgtggcccagatcctggacagccggatgaacaccaagtacgacgagaacgacaagctgatccgggaggtgaaggtgatcaccctcaagagcaagctggtgagcgacttccggaaggacttccagttctacaaggtgcgggagatcaacaactaccaccacgcccacgacgcctacctgaacgccgtggtgggcaccgccctgatcaagaagtaccccaagctggagagcgagttcgtgtacggcgactacaaggtgtacgacgtgcggaagatgatcgccaagagcgagcaggagatcggcaaggccaccgccaagtacttcttctacagcaacatcatgaacttcttcaagaccgagatcaccctggccaacggcgagatccggaagcggcccctgatcgagacaaacggcgagacaggcgagatcgtgtgggacaagggccgggacttcgccaccgtgcggaaggtgctgagcatgccccaggtgaacatcgtgaagaagaccgaggtgcagaccggcggcttcagcaaggagagcatcctgcccaagcggaacagcgacaagctgatcgcccggaagaaggactgggaccccaagaagtacggcggcttcgagagccccaccgtggcctacagcgtgctggtggtggccaaggtggagaagggcaagagcaagaagctcaagagcgtgaaggagctgctgggcatcaccatcatggagcggagcagcttcgagaagaaccccatcgacttcctggaggccaagggctacaaggaggtgaagaaggacctgatcatcaagctgcccaagtacagcctgttcgagctggagaacggccggaagcggatgctggccagcgccggcgagctgcagaagggcaacgagctggccctgcccagcaagtacgtgaacttcctgtacctggccagccactacgagaagctgaagggcagccccgaggacaacgagcagaagcagctgttcgtggagcagcacaagcactacctggacgagatcatcgagcagatcagcgagttcagcaagcgggtgatcctggccgacgccaacctggacaaggtgctgagcgcctacaacaagcaccgggacaagcccatccgggagcaggccgagaacatcatccacctgttcaccctgaccaacctgggcgcccccgccgccttcaagtacttcgacaccaccatcgaccggaagcggtacaccagcaccaaggaggtgctggacgccaccctgatccaccagagcatcaccggcctgtacgagacacggatcgacctgagccagctgggcggcgac

SEQ ID NO: 695 - protein, 1367 aa, synthetic construct
DKKYSIGLAIGTNSVGWAVITDEYKVPSKKFKVLGNTDRHSIKKNLIGALLFDSGETAEATRLKRTARRRYTRRKNRICYLQEIFSNEMAKVDDSFFHRLEESFLVEEDKKHERHPIFGNIVDEVAYHEKYPTIYHLRKKLVDSTDKADLRLIYLALAHMIKFRGHFLIEGDLNPDNSDVDKLFIQLVQTYNQLFEENPINASGVDAKAILSARLSKSRRLENLIAQLPGEKKNGLFGNLIALSLGLTPNFKSNFDLAEDAKLQLSKDTYDDDLDNLLAQIGDQYADLFLAAKNLSDAILLSDILRVNTEITKAPLSASMIKRYDEHHQDLTLLKALVRQQLPEKYKEIFFDQSKNGYAGYIDGGASQEEFYKFIKPILEKMDGTEELLVKLNREDLLRKQRTFDNGSIPHQIHLGELHAILRRQEDFYPFLKDNREKIEKILTFRIPYYVGPLARGNSRFAWMTRKSEETITPWNFEEVVDKGASAQSFIERMTNFDKNLPNEKVLPKHSLLYEYFTVYNELTKVKYVTEGMRKPAFLSGEQKKAIVDLLFKTNRKVTVKQLKEDYFKKIECFDSVEISGVEDRFNASLGTYHDLLKIIKDKDFLDNEENEDILEDIVLTLTLFEDREMIEERLKTYAHLFDDKVMKQLKRRRYTGWGRLSRKLINGIRDKQSGKTILDFLKSDGFANRNFMQLIHDDSLTFKEDIQKAQVSGQGDSLHEHIANLAGSPAIKKGILQTVKVVDELVKVMGRHKPENIVIEMARENQTTQKGQKNSRERMKRIEEGIKELGSQILKEHPVENTQLQNEKLYLYYLQNGRDMYVDQELDINRLSDYDVDHIVPQSFLKDDSIDNKVLTRSDKNRGKSDNVPSEEVVKKMKNYWRQLLNAKLITQRKFDNLTKAERGGLSELDKAGFIKRQLVETRQITKHVAQILDSRMNTKYDENDKLIREVKVITLKSKLVSDFRKDFQFYKVREINNYHHAHDAYLNAVVGTALIKKYPKLESEFVYGDYKVYDVRKMIAKSEQEIGKATAKYFFYSNIMNFFKTEITLANGEIRKRPLIETNGETGEIVWDKGRDFATVRKVLSMPQVNIVKKTEVQTGGFSKESILPKRNSDKLIARKKDWDPKKYGGFESPTVAYSVLVVAKVEKGKSKKLKSVKELLGITIMERSSFEKNPIDFLEAKGYKEVKKDLIIKLPKYSLFELENGRKRMLASAGELQKGNELALPSKYVNFLYLASHYEKLKGSPEDNEQKQLFVEQHKHYLDEIIEQISEFSKRVILADANLDKVLSAYNKHRDKPIREQAENIIHLFTLTNLGAPAAFKYFDTTIDRKRYTSTKEVLDATLIHQSITGLYETRIDLSQLGGD

SEQ ID NO: 696 - RNA, 12 nt, synthetic construct
  source 1..12: mol_type = other RNA
gagggcgccgac

SEQ ID NO: 697 - protein, 4 aa, synthetic construct
EGAD

SEQ ID NO: 698 - RNA, 57 nt, synthetic construct
  source 1..57: mol_type = other RNA
  modified_base 25: mod_base = OTHER; note = N1-methylpseudouridine
  modified_base 26: mod_base = OTHER; note = N1-methylpseudouridine
  modified_base 53: mod_base = OTHER; note = N1-methylpseudouridine
  modified_base 55: mod_base = OTHER; note = N1-methylpseudouridine
aagcggaccgccgacggcagcgagttcgagagccccaagaagaagcggaaggtgtga

SEQ ID NO: 699 - protein, 18 aa, synthetic construct
KRTADGSEFESPKKKRKV

SEQ ID NO: 700 - RNA, 115 nt, synthetic construct
  source 1..115: mol_type = other RNA
  modified_base 9: mod_base = OTHER; note = N1-methyl pseudouridine
  modified_base 10: mod_base = OTHER; note = N1-methyl pseudouridine
  modified_base 13: mod_base = OTHER; note = N1-methyl pseudouridine
  modified_base 14: mod_base = OTHER; note = N1-methyl pseudouridine
  modified_base 19: mod_base = OTHER; note = N1-methyl pseudouridine
  modified_base 23: mod_base = OTHER; note = N1-methyl pseudouridine
  modified_base 24: mod_base = OTHER; note = N1-methyl pseudouridine
  modified_base 26: mod_base = OTHER; note = N1-methyl pseudouridine
  modified_base 34: mod_base = OTHER; note = N1-methyl pseudouridine
  modified_base 35: mod_base = OTHER; note = N1-methyl pseudouridine
  modified_base 39: mod_base = OTHER; note = N1-methyl pseudouridine
  modified_base 40: mod_base = OTHER; note = N1-methyl pseudouridine
  modified_base 42: mod_base = OTHER; note = N1-methyl pseudouridine
  modified_base 48: mod_base = OTHER; note = N1-methyl pseudouridine
  modified_base 53: mod_base = OTHER; note = N1-methyl pseudouridine
  modified_base 54: mod_base = OTHER; note = N1-methyl pseudouridine
  modified_base 56: mod_base = OTHER; note = N1-methyl pseudouridine
  modified_base 57: mod_base = OTHER; note = N1-methyl pseudouridine
  modified_base 59: mod_base = OTHER; note = N1-methyl pseudouridine
  modified_base 61: mod_base = OTHER; note = N1-methyl pseudouridine
  modified_base 65: mod_base = OTHER; note = N1-methyl pseudouridine
  modified_base 66: mod_base = OTHER; note = N1-methyl pseudouridine
  modified_base 72: mod_base = OTHER; note = N1-methyl pseudouridine
  modified_base 74: mod_base = OTHER; note = N1-methyl pseudouridine
  modified_base 78: mod_base = OTHER; note = N1-methyl pseudouridine
  modified_base 80: mod_base = OTHER; note = N1-methyl pseudouridine
  modified_base 81: mod_base = OTHER; note = N1-methyl pseudouridine
  modified_base 84: mod_base = OTHER; note = N1-methyl pseudouridine
  modified_base 86: mod_base = OTHER; note = N1-methyl pseudouridine
  modified_base 87: mod_base = OTHER; note = N1-methyl pseudouridine
  modified_base 88: mod_base = OTHER; note = N1-methyl pseudouridine
  modified_base 92: mod_base = OTHER; note = N1-methyl pseudouridine
  modified_base 99: mod_base = OTHER; note = N1-methyl pseudouridine
  modified_base 103: mod_base = OTHER; note = N1-methyl pseudouridine
  modified_base 110: mod_base = OTHER; note = N1-methyl pseudouridine
  modified_base 112: mod_base = OTHER; note = N1-methyl pseudouridine
gcggccgcttaattaagctgccttctgcggggcttgccttctggccatgcccttcttctctcccttgcacctgtacctcttggtctttgaataaagcctgagtaggaagtctaga

SEQ ID NO: 701 - RNA, 4950 nt, synthetic construct
  source 1..4950: mol_type = other RNA
  modified_base 6: mod_base = OTHER; note = N1-methylpseudouridine
  modified_base 9: mod_base = OTHER; note = N1-methylpseudouridine
  modified_base 15: mod_base = OTHER; note = N1-methylpseudouridine
  modified_base 18: mod_base = OTHER; note = N1-methylpseudouridine
  modified_base 20: mod_base = OTHER; note = N1-methylpseudouridine
  modified_base 24: mod_base = OTHER; note = N1-methylpseudouridine
  modified_base 26: mod_base = OTHER; note = N1-methylpseudouridine
  modified_base 28: mod_base = OTHER; note = N1-methylpseudouridine
  modified_base 32: mod_base = OTHER; note = N1-methylpseudouridine
  modified_base 34: mod_base = OTHER; note = N1-methylpseudouridine
  modified_base 36: mod_base = OTHER; note = N1-methylpseudouridine
  modified_base 40: mod_base = OTHER; note = N1-methylpseudouridine
  modified_base 42: mod_base = OTHER; note = N1-methylpseudouridine
  modified_base 48: mod_base = OTHER; note = N1-methylpseudouridine
  modified_base 53: mod_base = OTHER; note = N1-methylpseudouridine
  modified_base 55: mod_base = OTHER; note = N1-methylpseudouridine
  modified_base 66: mod_base = OTHER; note = N1-methylpseudouridine
  modified_base 75: mod_base = OTHER; note = N1-methylpseudouridine
  modified_base 80: mod_base = OTHER; note = N1-methylpseudouridine
  modified_base 81: mod_base = OTHER; note = N1-methylpseudouridine
  modified_base 92: mod_base = OTHER; note = N1-methylpseudouridine
  modified_base 95: mod_base = OTHER; note = N1-methylpseudouridine
  modified_base 99: mod_base = OTHER; note = N1-methylpseudouridine
  modified_base 111: mod_base = OTHER; note = N1-methylpseudouridine
  modified_base 117: mod_base = OTHER; note = N1-methylpseudouridine
  modified_base 147: mod_base = OTHER; note = N1-methylpseudouridine
  modified_base 153: mod_base = OTHER; note = N1-methylpseudouridine
  modified_base 162: mod_base = OTHER; note = N1-methylpseudouridine
  modified_base 165: mod_base = OTHER; note = N1-methylpseudouridine
  modified_base 168: mod_base = OTHER; note = N1-methylpseudouridine
  modified_base 171: mod_base = OTHER; note = N1-methylpseudouridine
  modified_base 183: mod_base = OTHER; note = N1-methylpseudouridine
  modified_base 186: mod_base = OTHER; note = N1-methylpseudouridine
  modified_base 197: mod_base = OTHER; note = N1-methylpseudouridine
  modified_base 210: mod_base = OTHER; note = N1-methylpseudouridine
  modified_base 216: mod_base = OTHER; note = N1-methylpseudouridine
  modified_base 243: mod_base = OTHER; note = N1-methylpseudouridine
  modified_base 246: mod_base = OTHER; note = N1-methylpseudouridine
  modified_base 252: mod_base = OTHER; note = N1-methylpseudouridine
  modified_base 267: mod_base = OTHER; note = N1-methylpseudouridine
  modified_base 270: mod_base = OTHER; note = N1-methylpseudouridine
  modified_base 273: mod_base = OTHER; note = N1-methylpseudouridine
  modified_base 281: mod_base = OTHER; note = N1-methylpseudouridine
  modified_base 288: mod_base = OTHER; note = N1-methylpseudouridine
  modified_base 291: mod_base = OTHER; note = N1-methylpseudouridine
  modified_base 303: mod_base = OTHER; note = N1-methylpseudouridine
  modified_base 305: mod_base = OTHER; note = N1-methylpseudouridine
  modified_base 309: mod_base = OTHER; note = N1-methylpseudouridine
  modified_base 314: mod_base = OTHER; note = N1-methylpseudouridine
  modified_base 315: mod_base = OTHER; note = N1-methylpseudouridine
  modified_base 323: mod_base = OTHER; note = N1-methylpseudouridine
  modified_base 327: mod_base = OTHER; note = N1-methylpseudouridine
  modified_base 330: mod_base = OTHER; note = N1-methylpseudouridine
  modified_base 332: mod_base = OTHER; note = N1-methylpseudouridine
  modified_base 345: mod_base = OTHER; note = N1-methylpseudouridine
  modified_base 348: mod_base = OTHER; note = N1-methylpseudouridine
  modified_base 360: mod_base = OTHER; note = N1-methylpseudouridine
  modified_base 369: mod_base = OTHER; note = N1-methylpseudouridine
  modified_base 372: mod_base = OTHER; note = N1-methylpseudouridine
  modified_base 374: mod_base = OTHER; note = N1-methylpseudouridine
  modified_base 375: mod_base = OTHER; note = N1-methylpseudouridine
  modified_base 381: mod_base = OTHER; note = N1-methylpseudouridine
  modified_base 414: mod_base = OTHER; note = N1-methylpseudouridine
  modified_base 417: mod_base = OTHER; note = N1-methylpseudouridine
  modified_base 423: mod_base = OTHER; note = N1-methylpseudouridine
  modified_base 426: mod_base = OTHER; note = N1-methylpseudouridine
  modified_base 441: mod_base = OTHER; note = N1-methylpseudouridine
  modified_base 453: mod_base = OTHER; note = N1-methylpseudouridine
  modified_base 459: mod_base = OTHER; note = N1-methylpseudouridine
  modified_base 471: mod_base = OTHER; note = N1-methylpseudouridine
  modified_base 474: mod_base = OTHER; note = N1-methylpseudouridine
  modified_base 485: mod_base = OTHER; note = N1-methylpseudouridine
  modified_base 495: mod_base = OTHER; note = N1-methylpseudouridine
  modified_base 498: mod_base = OTHER; note = N1-methylpseudouridine
  modified_base 500: mod_base = OTHER; note = N1-methylpseudouridine
  modified_base 506: mod_base = OTHER; note = N1-methylpseudouridine
  modified_base 507: mod_base = OTHER; note = N1-methylpseudouridine
  modified_base 509: mod_base = OTHER; note = N1-methylpseudouridine
  modified_base 510: mod_base = OTHER; note = N1-methylpseudouridine
  modified_base 516: mod_base = OTHER; note = N1-methylpseudouridine
  modified_base 528: mod_base = OTHER; note = N1-methylpseudouridine
  modified_base 530: mod_base = OTHER; note = N1-methylpseudouridine
  modified_base 531: mod_base = OTHER; note = N1-methylpseudouridine
  modified_base 671: mod_base = OTHER; note = N1-methylpseudouridine
  modified_base 678: mod_base = OTHER; note = N1-methylpseudouridine
  modified_base 684: mod_base = OTHER; note = N1-methylpseudouridine
  modified_base 690: mod_base = OTHER; note = N1-methylpseudouridine
  modified_base 705: mod_base = OTHER; note = N1-methylpseudouridine
  modified_base 710: mod_base = OTHER; note = N1-methylpseudouridine
  modified_base 717: mod_base = OTHER; note = N1-methylpseudouridine
  modified_base 720: mod_base = OTHER; note = N1-methylpseudouridine
  modified_base 731: mod_base = OTHER; note = N1-methylpseudouridine
  modified_base 738: mod_base = OTHER; note = N1-methylpseudouridine
  modified_base 752: mod_base = OTHER; note = N1-methylpseudouridine
  modified_base 753: mod_base = OTHER; note = N1-methylpseudouridine
  modified_base 759: mod_base = OTHER; note = N1-methylpseudouridine
  modified_base 762: mod_base = OTHER; note = N1-methylpseudouridine
  modified_base 786: mod_base = OTHER; note = N1-methylpseudouridine
  modified_base 798: mod_base = OTHER; note = N1-methylpseudouridine
  modified_base 801: mod_base = OTHER; note = N1-methylpseudouridine
  modified_base 810: mod_base = OTHER; note = N1-methylpseudouridine
  modified_base 813: mod_base = OTHER; note = N1-methylpseudouridine
  modified_base 815: mod_base = OTHER; note = N1-methylpseudouridine
  modified_base 816: mod_base = OTHER; note = N1-methylpseudouridine
  modified_base 849: mod_base = OTHER; note = N1-methylpseudouridine
  modified_base 872: mod_base = OTHER; note = N1-methylpseudouridine
  modified_base 894: mod_base = OTHER; note = N1-methylpseudouridine
  modified_base 896: mod_base = OTHER; note = N1-methylpseudouridine
  modified_base 899: mod_base = OTHER; note = N1-methylpseudouridine
  modified_base 903: mod_base = OTHER; note = N1-methylpseudouridine
  modified_base 912: mod_base = OTHER; note = N1-methylpseudouridine
  modified_base 914: mod_base = OTHER; note = N1-methylpseudouridine
  modified_base 915: mod_base = OTHER; note = N1-methylpseudouridine
  modified_base 927: mod_base = OTHER; note = N1-methylpseudouridine
  modified_base 936: mod_base = OTHER; note = N1-methylpseudouridine
  modified_base 947: mod_base = OTHER; note = N1-methylpseudouridine
  modified_base 948: mod_base = OTHER; note = N1-methylpseudouridine
  modified_base 950: mod_base = OTHER; note = N1-methylpseudouridine
  modified_base 951: mod_base = OTHER; note = N1-methylpseudouridine
  modified_base 960: mod_base = OTHER; note = N1-methylpseudouridine
  modified_base 971: mod_base = OTHER; note = N1-methylpseudouridine
  modified_base 972: mod_base = OTHER; note = N1-methylpseudouridine
  modified_base 975: mod_base = OTHER; note = N1-methylpseudouridine
  modified_base 978: mod_base = OTHER; note = N1-methylpseudouridine
  modified_base 1011: mod_base = OTHER; note = N1-methylpseudouridine
  modified_base 1013: mod_base = OTHER; note = N1-methylpseudouridine
  modified_base 1014: mod_base = OTHER; note = N1-methylpseudouridine
  modified_base 1023: mod_base = OTHER; note = N1-methylpseudouridine
  modified_base 1026: mod_base = OTHER; note = N1-methylpseudouridine
  modified_base 1035: mod_base = OTHER; note = N1-methylpseudouridine
  modified_base 1040: mod_base = OTHER; note = N1-methylpseudouridine
  modified_base 1052: mod_base = OTHER; note = N1-methylpseudouridine
  modified_base 1062: mod_base = OTHER; note = N1-methylpseudouridine
  modified_base 1064: mod_base = OTHER; note = N1-methylpseudouridine
  modified_base 1071: mod_base = OTHER; note = N1-methylpseudouridine
  modified_base 1083: mod_base = OTHER; note = N1-methylpseudouridine
  modified_base 1086: mod_base = OTHER; note = N1-methylpseudouridine
  modified_base 1110: mod_base = OTHER; note = N1-methylpseudouridine
  modified_base 1116: mod_base = OTHER; note = N1-methylpseudouridine
  modified_base 1119: mod_base = OTHER; note = N1-methylpseudouridine
  modified_base 1121: mod_base = OTHER; note = N1-methylpseudouridine
  modified_base 1125: mod_base = OTHER; note = N1-methylpseudouridine
  modified_base 1131: mod_base = OTHER; note = N1-methylpseudouridine
  modified_base 1140: mod_base = OTHER; note = N1-methylpseudouridine
  modified_base 1143: mod_base = OTHER; note = N1-methylpseudouridine
  modified_base 1148: mod_base = OTHER; note = N1-methylpseudouridine
  modified_base 1149: mod_base = OTHER; note = N1-methylpseudouridine
  modified_base 1160: mod_base = OTHER; note = N1-methylpseudouridine
  modified_base 1161: mod_base = OTHER; note = N1-methylpseudouridine
  modified_base 1164: mod_base = OTHER; note = N1-methylpseudouridine
  modified_base 1167: mod_base = OTHER; note = N1-methylpseudouridine
  modified_base 1179: mod_base = OTHER; note = N1-methylpseudouridine
  modified_base 1200: mod_base = OTHER; note = N1-methylpseudouridine
  modified_base 1209: mod_base = OTHER; note = N1-methylpseudouridine
  modified_base 1211: mod_base = OTHER; note = N1-methylpseudouridine
  modified_base 1212: mod_base = OTHER; note = N1-methylpseudouridine
  modified_base 1215: mod_base = OTHER; note = N1-methylpseudouridine
  modified_base 1221: mod_base = OTHER; note = N1-methylpseudouridine
  modified_base 1224: mod_base = OTHER; note = N1-methylpseudouridine
  modified_base 1232: mod_base = OTHER; note = N1-methylpseudouridine
  modified_base 1242: mod_base = OTHER; note = N1-methylpseudouridine
  modified_base 1244: mod_base = OTHER; note = N1-methylpseudouridine
  modified_base 1245: mod_base = OTHER; note = N1-methylpseudouridine
  modified_base 1260: mod_base = OTHER; note = N1-methylpseudouridine
  modified_base 1275: mod_base = OTHER; note = N1-methylpseudouridine
  modified_base 1290: mod_base = OTHER; note = N1-methylpseudouridine
  modified_base 1293: mod_base = OTHER; note = N1-methylpseudouridine
  modified_base 1305: mod_base = OTHER; note = N1-methylpseudouridine
  modified_base 1323: mod_base = OTHER; note = N1-methylpseudouridine
  modified_base 1332: mod_base = OTHER; note = N1-methylpseudouridine
  modified_base 1335: mod_base = OTHER; note = N1-methylpseudouridine
  modified_base 1344: mod_base = OTHER; note = N1-methylpseudouridine
  modified_base 1368: mod_base = OTHER; note = N1-methylpseudouridine
  modified_base 1370: mod_base = OTHER; note = N1-methylpseudouridine
  modified_base 1371: mod_base = OTHER; note = N1-methylpseudouridine
  modified_base 1380: mod_base = OTHER; note = N1-methylpseudouridine
  modified_base 1383: mod_base = OTHER; note = N1-methylpseudouridine
  modified_base 1389: mod_base = OTHER; note = N1-methylpseudouridine
  modified_base 1395: mod_base = OTHER; note = N1-methylpseudouridine
  modified_base 1401: mod_base = OTHER; note = N1-methylpseudouridine
  modified_base 1412: mod_base = OTHER; note = N1-methylpseudouridine
  modified_base 1413: mod_base = OTHER; note = N1-methylpseudouridine
  modified_base 1424: mod_base = OTHER; note = N1-methylpseudouridine
  modified_base 1425: mod_base = OTHER; note = N1-methylpseudouridine
  modified_base 1431: mod_base = OTHER; note = N1-methylpseudouridine
  modified_base 1449: mod_base = OTHER; note = N1-methylpseudouridine
  modified_base 1455: mod_base = OTHER; note = N1-methylpseudouridine
  modified_base 1469: mod_base = OTHER; note = N1-methylpseudouridine
  modified_base 1482: mod_base = OTHER; note = N1-methylpseudouridine
  modified_base 1491: mod_base = OTHER; note = N1-methylpseudouridine
  modified_base 1494: mod_base = OTHER; note = N1-methylpseudouridine
  modified_base 1503: mod_base = OTHER; note = N1-methylpseudouridine
  modified_base 1514: mod_base = OTHER; note = N1-methylpseudouridine
  modified_base 1524: mod_base = OTHER; note = N1-methylpseudouridine
  modified_base 1526: mod_base = OTHER; note = N1-methylpseudouridine
  modified_base 1527: mod_base = OTHER; note = N1-methylpseudouridine
  modified_base 1530: mod_base = OTHER; note = N1-methylpseudouridine
  modified_base 1545: mod_base = OTHER; note = N1-methylpseudouridine
  modified_base 1557: mod_base = OTHER; note = N1-methylpseudouridine
  modified_base 1560: mod_base = OTHER; note = N1-methylpseudouridine
  modified_base 1563: mod_base = OTHER; note = N1-methylpseudouridine
  modified_base 1572: mod_base = OTHER; note = N1-methylpseudouridine
  modified_base 1575: mod_base = OTHER; note = N1-methylpseudouridine
  modified_base 1581: mod_base = OTHER; note = N1-methylpseudouridine
  modified_base 1593: mod_base = OTHER; note = N1-methylpseudouridine
  modified_base 1608: mod_base = OTHER; note = N1-methylpseudouridine
  modified_base 1620: mod_base = OTHER; note = N1-methylpseudouridine
  modified_base 1623: mod_base = OTHER; note = N1-methylpseudouridine
  modified_base 1631: mod_base = OTHER; note = N1-methylpseudouridine
  modified_base 1653: mod_base = OTHER; note = N1-methylpseudouridine
  modified_base 1659: mod_base = OTHER; note = N1-methylpseudouridine
  modified_base 1662: mod_base = OTHER; note = N1-methylpseudouridine
  modified_base 1671: mod_base = OTHER; note = N1-methylpseudouridine
  modified_base 1674: mod_base = OTHER; note = N1-methylpseudouridine
  modified_base 1686: mod_base = OTHER; note = N1-methylpseudouridine
  modified_base 1697: mod_base = OTHER; note = N1-methylpseudouridine
  modified_base 1707: mod_base = OTHER; note = N1-methylpseudouridine
  modified_base 1709: mod_base = OTHER; note = N1-methylpseudouridine
  modified_base 1710: mod_base = OTHER; note = N1-methylpseudouridine
  modified_base 1712: mod_base = OTHER; note = N1-methylpseudouridine
  modified_base 1713: mod_base = OTHER; note = N1-methylpseudouridine
  modified_base 1733: mod_base = OTHER; note = N1-methylpseudouridine
  modified_base 1742: mod_base = OTHER; note = N1-methylpseudouridine
  modified_base 1746: mod_base = OTHER; note = N1-methylpseudouridine
  modified_base 1772: mod_base = OTHER; note = N1-methylpseudouridine
  modified_base 1773: mod_base = OTHER; note = N1-methylpseudouridine
  modified_base 1775: mod_base = OTHER; note = N1-methylpseudouridine
  modified_base 1781: mod_base = OTHER; note = N1-methylpseudouridine
  modified_base 1782: mod_base = OTHER; note = N1-methylpseudouridine
  modified_base 1785: mod_base = OTHER; note = N1-methylpseudouridine
  modified_base 1794: mod_base = OTHER; note = N1-methylpseudouridine
  modified_base 1797: mod_base = OTHER; note = N1-methylpseudouridine
  modified_base 1806: mod_base = OTHER; note = N1-methylpseudouridine
  modified_base 1824: mod_base = OTHER; note = N1-methylpseudouridine
  modified_base 1827: mod_base = OTHER; note = N1-methylpseudouridine
  modified_base 1830: mod_base = OTHER; note = N1-methylpseudouridine
  modified_base 1836: mod_base = OTHER; note = N1-methylpseudouridine
  modified_base 1851: mod_base = OTHER; note = N1-methylpseudouridine
  modified_base 1854: mod_base = OTHER; note = N1-methylpseudouridine
  modified_base 1871: mod_base = OTHER; note = N1-methylpseudouridine
  modified_base 1872: mod_base = OTHER; note = N1-methylpseudouridine
  modified_base 1887: mod_base = OTHER; note = N1-methylpseudouridine
  modified_base 1899: mod_base = OTHER; note = N1-methylpseudouridine
  modified_base 1905: mod_base = OTHER; note = N1-methylpseudouridine
  modified_base 1914: mod_base = OTHER; note = N1-methylpseudouridine
  modified_base 1923: mod_base = OTHER; note = N1-methylpseudouridine
  modified_base 1926: mod_base = OTHER; note = N1-methylpseudouridine
  modified_base 1943: mod_base = OTHER; note = N1-methylpseudouridine
  modified_base 1944: mod_base = OTHER; note = N1-methylpseudouridine
  modified_base 1946: mod_base = OTHER; note = N1-methylpseudouridine
  modified_base 1952: mod_base = OTHER; note = N1-methylpseudouridine
  modified_base 1953: mod_base = OTHER; note = N1-methylpseudouridine
  modified_base 1956: mod_base = OTHER; note = N1-methylpseudouridine
  modified_base 1977: mod_base = OTHER; note = N1-methylpseudouridine
  modified_base 1986: mod_base = OTHER; note = N1-methylpseudouridine
  modified_base 1989: mod_base = OTHER; note = N1-methylpseudouridine
  modified_base 1994: mod_base = OTHER; note = N1-methylpseudouridine
  modified_base 1995: mod_base = OTHER; note = N1-methylpseudouridine
  modified_base 2001: mod_base = OTHER; note = N1-methylpseudouridine
  modified_base 2006: mod_base = OTHER; note = N1-methylpseudouridine
  modified_base 2009: mod_base = OTHER; note = N1-methylpseudouridine
  modified_base 2013: mod_base = OTHER; note = N1-methylpseudouridine
  modified_base 2022: mod_base = OTHER; note = N1-methylpseudouridine
  modified_base 2042: mod_base = OTHER; note = N1-methylpseudouridine
  modified_base 2043: mod_base = OTHER; note = N1-methylpseudouridine
  modified_base 2048: mod_base = OTHER; note = N1-methylpseudouridine
  modified_base 2052: mod_base = OTHER; note = N1-methylpseudouridine
  modified_base 2076: mod_base = OTHER; note = N1-methylpseudouridine
  modified_base 2084: mod_base = OTHER; note = N1-methylpseudouridine
  modified_base 2090: mod_base = OTHER; note = N1-methylpseudouridine
  modified_base 2091: mod_base = OTHER; note = N1-methylpseudouridine
  modified_base 2100: mod_base = OTHER; note = N1-methylpseudouridine
  modified_base 2103: mod_base = OTHER; note = N1-methylpseudouridine
  modified_base 2129: mod_base = OTHER; note = N1-methylpseudouridine
  modified_base 2130: mod_base = OTHER; note = N1-methylpseudouridine
  modified_base 2133: mod_base = OTHER; note = N1-methylpseudouridine
  modified_base 2142: mod_base = OTHER; note = N1-methylpseudouridine
  modified_base 2150: mod_base = OTHER; note = N1-methylpseudouridine
  modified_base 2151: mod_base = OTHER; note = N1-methylpseudouridine
  modified_base 2163: mod_base = OTHER; note = N1-methylpseudouridine
  modified_base 2178: mod_base = OTHER; note = N1-methylpseudouridine
  modified_base 2181: mod_base = OTHER; note = N1-methylpseudouridine
  modified_base 2196: mod_base = OTHER; note = N1-methylpseudouridine
  modified_base 2199: mod_base = OTHER; note = N1-methylpseudouridine
  modified_base 2201: mod_base = OTHER; note = N1-methylpseudouridine
  modified_base 2207: mod_base = OTHER; note = N1-methylpseudouridine
  modified_base 2210: mod_base = OTHER; note = N1-methylpseudouridine
  modified_base 2211: mod_base = OTHER; note = N1-methylpseudouridine
  modified_base 2217: mod_base = OTHER; note = N1-methylpseudouridine
  modified_base 2219: mod_base = OTHER; note = N1-methylpseudouridine
  modified_base 2229: mod_base = OTHER; note = N1-methylpseudouridine
  modified_base 2238: mod_base = OTHER; note = N1-methylpseudouridine
  modified_base 2243: mod_base = OTHER; note = N1-methylpseudouridine
  modified_base 2247: mod_base = OTHER; note = N1-methylpseudouridine
  modified_base 2259: mod_base = OTHER; note = N1-methylpseudouridine
  modified_base 2273: mod_base = OTHER; note = N1-methylpseudouridine
  modified_base 2274: mod_base = OTHER; note = N1-methylpseudouridine
  modified_base 2277: mod_base = OTHER; note = N1-methylpseudouridine
  modified_base 2301: mod_base = OTHER; note = N1-methylpseudouridine
  modified_base 2304: mod_base = OTHER; note = N1-methylpseudouridine
  modified_base 2310: mod_base = OTHER; note = N1-methylpseudouridine
  modified_base 2313: mod_base = OTHER; note = N1-methylpseudouridine
  modified_base 2315: mod_base = OTHER; note = N1-methylpseudouridine
  modified_base 2316: mod_base = OTHER; note = N1-methylpseudouridine
  modified_base 2334: mod_base = OTHER; note = N1-methylpseudouridine
  modified_base 2340: mod_base = OTHER; note = N1-methylpseudouridine
  modified_base 2349: mod_base = OTHER; note = N1-methylpseudouridine
  modified_base 2360: mod_base = OTHER; note = N1-methylpseudouridine
  modified_base 2363: mod_base = OTHER; note = N1-methylpseudouridine
  modified_base 2364: mod_base = OTHER; note = N1-methylpseudouridine
  modified_base 2373: mod_base = OTHER; note = N1-methylpseudouridine
  modified_base 2378: mod_base = OTHER; note = N1-methylpseudouridine
  modified_base 2381: mod_base = OTHER; note = N1-methylpseudouridine
  modified_base 2382: mod_base = OTHER; note = N1-methylpseudouridine
  modified_base 2391: mod_base = OTHER; note = N1-methylpseudouridine
  modified_base 2397: mod_base = OTHER; note = N1-methylpseudouridine
  modified_base 2406: mod_base = OTHER; note = N1-methylpseudouridine
  modified_base 2417: mod_base = OTHER; note = N1-methylpseudouridine
  modified_base 2418: mod_base = OTHER; note = N1-methylpseudouridine
  modified_base 2430: mod_base = OTHER; note = N1-methylpseudouridine
  modified_base 2438: mod_base = OTHER; note = N1-methylpseudouridine
  modified_base 2448: mod_base = OTHER; note = N1-methylpseudouridine
  modified_base 2451: mod_base = OTHER; note = N1-methylpseudouridine
  modified_base 2457: mod_base = OTHER; note = N1-methylpseudouridine
  modified_base 2460: mod_base = OTHER; note = N1-methylpseudouridine
  modified_base 2474: mod_base = OTHER; note = N1-methylpseudouridine
  modified_base 2475: mod_base = OTHER; note = N1-methylpseudouridine
  modified_base 2478: mod_base = OTHER; note = N1-methylpseudouridine
  modified_base 2502: mod_base = OTHER; note = N1-methylpseudouridine
  modified_base 2505: mod_base = OTHER; note = N1-methylpseudouridine
  modified_base 2514: mod_base = OTHER; note = N1-methylpseudouridine
  modified_base 2517: mod_base = OTHER; note = N1-methylpseudouridine
  modified_base 2520: mod_base = OTHER; note = N1-methylpseudouridine
  modified_base 2526: mod_base = OTHER; note = N1-methylpseudouridine
  modified_base 2532: mod_base = OTHER; note = N1-methylpseudouridine
  modified_base 2534: mod_base = OTHER; note = N1-methylpseudouridine
  modified_base 2535: mod_base = OTHER; note = N1-methylpseudouridine
  modified_base 2550: mod_base = OTHER; note = N1-methylpseudouridine
  modified_base 2553: mod_base = OTHER; note = N1-methylpseudouridine
  modified_base 2565: mod_base = OTHER; note = N1-methylpseudouridine
  modified_base 2573: mod_base = OTHER; note = N1-methylpseudouridine
  modified_base 2583: mod_base = OTHER; note = N1-methylpseudouridine
  modified_base 2585: mod_base = OTHER; note = N1-methylpseudouridine
  modified_base 2586: mod_base = OTHER; note = N1-methylpseudouridine
  modified_base 2598: mod_base = OTHER; note = N1-methylpseudouridine
  modified_base 2601: mod_base = OTHER; note = N1-methylpseudouridine
  modified_base 2610: mod_base = OTHER; note = N1-methylpseudouridine
  modified_base 2624: mod_base = OTHER; note = N1-methylpseudouridine
  modified_base 2633: mod_base = OTHER; note = N1-methylpseudouridine
  modified_base 2643: mod_base = OTHER; note = N1-methylpseudouridine
  modified_base 2655: mod_base = OTHER; note = N1-methylpseudouridine
  modified_base 2658: mod_base = OTHER; note = N1-methylpseudouridine
  modified_base 2667: mod_base = OTHER; note = N1-methylpseudouridine
  modified_base 2694: mod_base = OTHER; note = N1-methylpseudouridine
  modified_base 2697: mod_base = OTHER; note = N1-methylpseudouridine
  modified_base 2702: mod_base = OTHER; note = N1-methylpseudouridine
  modified_base 2703: mod_base = OTHER; note = N1-methylpseudouridine
  modified_base 2706: mod_base = OTHER; note = N1-methylpseudouridine
  modified_base 2720: mod_base = OTHER; note = N1-methylpseudouridine
  modified_base 2721: mod_base = OTHER; note = N1-methylpseudouridine
  modified_base 2735: mod_base = OTHER; note = N1-methylpseudouridine
  modified_base 2736: mod_base = OTHER; note = N1-methylpseudouridine
  modified_base 2739: mod_base = OTHER; note = N1-methylpseudouridine
  modified_base 2745: mod_base = OTHER; note = N1-methylpseudouridine
  modified_base 2748: mod_base = OTHER; note = N1-methylpseudouridine
  modified_base 2763: mod_base = OTHER; note = N1-methylpseudouridine
  modified_base 2768: mod_base = OTHER; note = N1-methylpseudouridine
  modified_base 2769: mod_base = OTHER; note = N1-methylpseudouridine
  modified_base 2781: mod_base = OTHER; note = N1-methylpseudouridine
  modified_base 2796: mod_base = OTHER; note = N1-methylpseudouridine
  modified_base 2817: mod_base = OTHER; note = N1-methylpseudouridine
  modified_base 2829: mod_base = OTHER; note = N1-methylpseudouridine
  modified_base 2838: mod_base = OTHER; note = N1-methylpseudouridine
  modified_base 2856: mod_base = OTHER; note = N1-methylpseudouridine
  modified_base 2868: mod_base = OTHER; note = N1-methylpseudouridine
  modified_base 2871: mod_base = OTHER; note = N1-methylpseudouridine
  modified_base 2880: mod_base = OTHER; note = N1-methylpseudouridine
  modified_base 2886: mod_base = OTHER; note = N1-methylpseudouridine
  modified_base 2889: mod_base = OTHER; note = N1-methylpseudouridine
  modified_base 2898: mod_base = OTHER; note = N1-methylpseudouridine
  modified_base 2901: mod_base = OTHER; note = N1-methylpseudouridine
  modified_base 2907: mod_base = OTHER; note = N1-methylpseudouridine
  modified_base 2910: mod_base = OTHER; note = N1-methylpseudouridine
  modified_base 2934: mod_base = OTHER; note = N1-methylpseudouridine
  modified_base 2937: mod_base = OTHER; note = N1-methylpseudouridine
  modified_base 2940: mod_base = OTHER; note = N1-methylpseudouridine
  modified_base 2946: mod_base = OTHER; note = N1-methylpseudouridine
  modified_base 3000: mod_base = OTHER; note = N1-methylpseudouridine
  modified_base 3009: mod_base = OTHER; note = N1-methylpseudouridine
  modified_base 3021: mod_base = OTHER; note = N1-methylpseudouridine
  modified_base 3030: mod_base = OTHER; note = N1-methylpseudouridine
  modified_base 3042: mod_base = OTHER; note = N1-methylpseudouridine
  modified_base 3045: mod_base = OTHER; note = N1-methylpseudouridine
  modified_base 3060: mod_base = OTHER; note = N1-methylpseudouridine
  modified_base 3075: mod_base = OTHER; note = N1-methylpseudouridine
  modified_base 3090: mod_base = OTHER; note = N1-methylpseudouridine
  modified_base 3092: mod_base = OTHER; note = N1-methylpseudouridine
  modified_base 3096: mod_base = OTHER; note = N1-methylpseudouridine
  modified_base 3098: mod_base = OTHER; note = N1-methylpseudouridine
  modified_base 3101: mod_base = OTHER; note = N1-methylpseudouridine
  modified_base 3105: mod_base = OTHER; note = N1-methylpseudouridine
  modified_base 3123: mod_base = OTHER; note = N1-methylpseudouridine
  modified_base 3125: mod_base = OTHER; note = N1-methylpseudouridine
  modified_base 3129: mod_base = OTHER; note = N1-methylpseudouridine
  modified_base 3141: mod_base = OTHER; note = N1-methylpseudouridine
  modified_base 3147: mod_base = OTHER; note = N1-methylpseudouridine
  modified_base 3156: mod_base = OTHER; note = N1-methylpseudouridine
  modified_base 3164: mod_base = OTHER; note = N1-methylpseudouridine
  modified_base 3171: mod_base = OTHER; note = N1-methylpseudouridine
  modified_base 3180: mod_base = OTHER; note = N1-methylpseudouridine
  modified_base 3183: mod_base = OTHER; note = N1-methylpseudouridine
  modified_base 3194: mod_base = OTHER; note = N1-methylpseudouridine
  modified_base 3195: mod_base = OTHER; note = N1-methylpseudouridine
  modified_base 3198: mod_base = OTHER; note = N1-methylpseudouridine
  modified_base 3213: mod_base = OTHER; note = N1-methylpseudouridine
  modified_base 3225: mod_base = OTHER; note = N1-methylpseudouridine
  modified_base 3228: mod_base = OTHER; note = N1-methylpseudouridine
  modified_base 3267: mod_base = OTHER; note = N1-methylpseudouridine
  modified_base 3282: mod_base = OTHER; note = N1-methylpseudouridine
  modified_base 3285: mod_base = OTHER; note = N1-methylpseudouridine
  modified_base 3294: mod_base = OTHER; note = N1-methylpseudouridine
  modified_base 3302: mod_base = OTHER; note = N1-methylpseudouridine
  modified_base 3305: mod_base = OTHER; note = N1-methylpseudouridine
  modified_base 3315: mod_base = OTHER; note = N1-methylpseudouridine
  modified_base 3318: mod_base = OTHER; note = N1-methylpseudouridine
  modified_base 3330: mod_base = OTHER; note = N1-methylpseudouridine
  modified_base 3333: mod_base = OTHER; note = N1-methylpseudouridine
  modified_base 3347: mod_base = OTHER; note = N1-methylpseudouridine
  modified_base 3348: mod_base = OTHER; note = N1-methylpseudouridine
  modified_base 3357: mod_base = OTHER; note = N1-methylpseudouridine
  modified_base 3381: mod_base = OTHER; note = N1-methylpseudouridine
  modified_base 3390: mod_base = OTHER; note = N1-methylpseudouridine
  modified_base 3404: mod_base = OTHER; note = N1-methylpseudouridine
  modified_base 3405: mod_base = OTHER; note = N1-methylpseudouridine
  modified_base 3408: mod_base = OTHER; note = N1-methylpseudouridine
  modified_base 3420: mod_base = OTHER; note = N1-methylpseudouridine
  modified_base 3423: mod_base = OTHER; note = N1-methylpseudouridine
  modified_base 3438: mod_base = OTHER; note = N1-methylpseudouridine
  modified_base 3450: mod_base = OTHER; note = N1-methylpseudouridine
  modified_base 3459: mod_base = OTHER; note = N1-methylpseudouridine
  modified_base 3462: mod_base = OTHER; note = N1-methylpseudouridine
  modified_base 3474: mod_base = OTHER; note = N1-methylpseudouridine
  modified_base 3485: mod_base = OTHER; note = N1-methylpseudouridine
  modified_base 3504: mod_base = OTHER; note = N1-methylpseudouridine
  modified_base 3507: mod_base = OTHER; note = N1-methylpseudouridine
  modified_base 3516: mod_base = OTHER; note = N1-methylpseudouridine
  modified_base 3522: mod_base = OTHER; note = N1-methylpseudouridine
  modified_base 3525: mod_base = OTHER; note = N1-methylpseudouridine
  modified_base 3531: mod_base = OTHER; note = N1-methylpseudouridine
  modified_base 3543: mod_base = OTHER; note = N1-methylpseudouridine
  modified_base 3546: mod_base = OTHER; note = N1-methylpseudouridine
  modified_base 3554: mod_base = OTHER; note = N1-methylpseudouridine
  modified_base 3555: mod_base = OTHER; note = N1-methylpseudouridine
  modified_base 3566: mod_base = OTHER; note = N1-methylpseudouridine
  modified_base 3567: mod_base = OTHER; note = N1-methylpseudouridine
  modified_base 3572: mod_base = OTHER; note = N1-methylpseudouridine
  modified_base 3573: mod_base = OTHER; note = N1-methylpseudouridine
  modified_base 3575: mod_base = OTHER; note = N1-methylpseudouridine
  modified_base 3582: mod_base = OTHER; note = N1-methylpseudouridine
  modified_base 3591: mod_base = OTHER; note = N1-methylpseudouridine
  modified_base 3599: mod_base = OTHER; note = N1-methylpseudouridine
  modified_base 3620: mod_base = OTHER; note = N1-methylpseudouridine
  modified_base 3624: mod_base = OTHER; note = N1-methylpseudouridine
  modified_base 3633: mod_base = OTHER; note = N1-methylpseudouridine
  modified_base 3636: mod_base = OTHER; note = N1-methylpseudouridine
  modified_base 3648: mod_base = OTHER; note = N1-methylpseudouridine
  modified_base 3651: mod_base = OTHER; note = N1-methylpseudouridine
  modified_base 3659: mod_base = OTHER; note = N1-methylpseudouridine
  modified_base 3669: mod_base = OTHER; note = N1-methylpseudouridine
  modified_base 3680: mod_base = OTHER; note = N1-methylpseudouridine
  modified_base 3681: mod_base = OTHER; note = N1-methylpseudouridine
  modified_base 3684: mod_base = OTHER; note = N1-methylpseudouridine
  modified_base 3686: mod_base = OTHER; note = N1-methylpseudouridine
  modified_base 3695: mod_base = OTHER; note = N1-methylpseudouridine
  modified_base 3702: mod_base = OTHER; note = N1-methylpseudouridine
  modified_base 3704: mod_base = OTHER; note = N1-methylpseudouridine
  modified_base 3711: mod_base = OTHER; note = N1-methylpseudouridine
  modified_base 3720: mod_base = OTHER; note = N1-methylpseudouridine
  modified_base 3723: mod_base = OTHER; note = N1-methylpseudouridine
  modified_base 3744: mod_base = OTHER; note = N1-methylpseudouridine
  modified_base 3764: mod_base = OTHER; note = N1-methylpseudouridine
  modified_base 3767: mod_base = OTHER; note = N1-methylpseudouridine
  modified_base 3768: mod_base = OTHER; note = N1-methylpseudouridine
  modified_base 3770: mod_base = OTHER; note = N1-methylpseudouridine
  modified_base 3771: mod_base = OTHER; note = N1-methylpseudouridine
  modified_base 3773: mod_base = OTHER; note = N1-methylpseudouridine
  modified_base 3783: mod_base = OTHER; note = N1-methylpseudouridine
  modified_base 3786: mod_base = OTHER; note = N1-methylpseudouridine
  modified_base 3791: mod_base = OTHER; note = N1-methylpseudouridine
  modified_base 3792: mod_base = OTHER; note = N1-methylpseudouridine
  modified_base 3794: mod_base = OTHER; note = N1-methylpseudouridine
  modified_base 3795: mod_base = OTHER; note = N1-methylpseudouridine
  modified_base 3807: mod_base = OTHER; note = N1-methylpseudouridine
  modified_base 3813: mod_base = OTHER; note = N1-methylpseudouridine
  modified_base 3828: mod_base = OTHER; note = N1-methylpseudouridine
  modified_base 3843: mod_base = OTHER; note = N1-methylpseudouridine
  modified_base 3846: mod_base = OTHER; note = N1-methylpseudouridine
  modified_base 3873: mod_base = OTHER; note = N1-methylpseudouridine
  modified_base 3876: mod_base = OTHER; note = N1-methylpseudouridine
  modified_base 3878: mod_base = OTHER; note = N1-methylpseudouridine
  modified_base 3896: mod_base = OTHER; note = N1-methylpseudouridine
  modified_base 3897: mod_base = OTHER; note = N1-methylpseudouridine
  modified_base 3906: mod_base = OTHER; note = N1-methylpseudouridine
  modified_base 3915: mod_base = OTHER; note = N1-methylpseudouridine
  modified_base 3918: mod_base = OTHER; note = N1-methylpseudouridine
  modified_base 3924: mod_base = OTHER; note = N1-methylpseudouridine
  modified_base 3933: mod_base = OTHER; note = N1-methylpseudouridine
  modified_base 3939: mod_base = OTHER; note = N1-methylpseudouridine
  modified_base 3942: mod_base = OTHER; note = N1-methylpseudouridine
  modified_base 3957: mod_base = OTHER; note = N1-methylpseudouridine
  modified_base 3971: mod_base = OTHER; note = N1-methylpseudouridine
  modified_base 3972: mod_base = OTHER; note = N1-methylpseudouridine
  modified_base 3987: mod_base = OTHER; note = N1-methylpseudouridine
  modified_base 3990: mod_base = OTHER; note = N1-methylpseudouridine
  modified_base 4014: mod_base = OTHER; note = N1-methylpseudouridine
  modified_base 4017: mod_base = OTHER; note = N1-methylpseudouridine
  modified_base 4034: mod_base = OTHER; note = N1-methylpseudouridine
  modified_base 4049: mod_base = OTHER; note = N1-methylpseudouridine
  modified_base 4058: mod_base = OTHER; note = N1-methylpseudouridine
  modified_base 4059: mod_base = OTHER; note = N1-methylpseudouridine
  modified_base 4074: mod_base = OTHER; note = N1-methylpseudouridine
  modified_base 4079: mod_base = OTHER; note = N1-methylpseudouridine
  modified_base 4086: mod_base = OTHER; note = N1-methylpseudouridine
  modified_base 4089: mod_base = OTHER; note = N1-methylpseudouridine
  modified_base 4092: mod_base = OTHER; note = N1-methylpseudouridine
  modified_base 4095: mod_base = OTHER; note = N1-methylpseudouridine
  modified_base 4104: mod_base = OTHER; note = N1-methylpseudouridine
  modified_base 4128: mod_base = OTHER; note = N1-methylpseudouridine
  modified_base 4137: mod_base = OTHER; note = N1-methylpseudouridine
  modified_base 4146: mod_base = OTHER; note = N1-methylpseudouridine
  modified_base 4149: mod_base = OTHER; note = N1-methylpseudouridine
  modified_base 4155: mod_base = OTHER; note = N1-methylpseudouridine
  modified_base 4161: mod_base = OTHER; note = N1-methylpseudouridine
  modified_base 4164: mod_base = OTHER; note = N1-methylpseudouridine
  modified_base 4178: mod_base = OTHER; note = N1-methylpseudouridine
  modified_base 4179: mod_base = OTHER; note = N1-methylpseudouridine
  modified_base 4194: mod_base = OTHER; note = N1-methylpseudouridine
  modified_base 4199: mod_base = OTHER; note = N1-methylpseudouridine
  modified_base 4200: mod_base = OTHER; note = N1-methylpseudouridine
  modified_base 4203: mod_base = OTHER; note = N1-methylpseudouridine
  modified_base 4217: mod_base = OTHER; note = N1-methylpseudouridine
  modified_base 4227: mod_base = OTHER; note = N1-methylpseudouridine
  modified_base 4239: mod_base = OTHER; note = N1-methylpseudouridine
  modified_base 4242: mod_base = OTHER; note = N1-methylpseudouridine
  modified_base 4245: mod_base = OTHER; note = N1-methylpseudouridine
  modified_base 4251: mod_base = OTHER; note = N1-methylpseudouridine
  modified_base 4259: mod_base = OTHER; note = N1-methylpseudouridine
  modified_base 4266: mod_base = OTHER; note = N1-methylpseudouridine
  modified_base 4268: mod_base = OTHER; note = N1-methylpseudouridine
  modified_base 4269: mod_base = OTHER; note = N1-methylpseudouridine
  modified_base 4275: mod_base = OTHER; note = N1-methylpseudouridine
  modified_base 4296: mod_base = OTHER; note = N1-methylpseudouridine
  modified_base 4299: mod_base = OTHER; note = N1-methylpseudouridine
  modified_base 4317: mod_base = OTHER; note = N1-methylpseudouridine
  modified_base 4335: mod_base = OTHER; note = N1-methylpseudouridine
  modified_base 4341: mod_base = OTHER; note = N1-methylpseudouridine
  modified_base 4352: mod_base = OTHER; note = N1-methylpseudouridine
  modified_base 4356: mod_base = OTHER; note = N1-methylpseudouridine
  modified_base 4361: mod_base = OTHER; note = N1-methylpseudouridine
  modified_base 4362: mod_base = OTHER; note = N1-methylpseudouridine
  modified_base 4365: mod_base = OTHER; note = N1-methylpseudouridine
  modified_base 4367: mod_base = OTHER; note = N1-methylpseudouridine
  modified_base 4371: mod_base = OTHER; note = N1-methylpseudouridine
  modified_base 4382: mod_base = OTHER; note = N1-methylpseudouridine
  modified_base 4392: mod_base = OTHER; note = N1-methylpseudouridine
  modified_base 4428: mod_base = OTHER; note = N1-methylpseudouridine
  modified_base 4430: mod_base = OTHER; note = N1-methylpseudouridine
  modified_base 4431: mod_base = OTHER; note = N1-methylpseudouridine
  modified_base 4434: mod_base = OTHER; note = N1-methylpseudouridine
  modified_base 4451: mod_base = OTHER; note = N1-methylpseudouridine
  modified_base 4455: mod_base = OTHER; note = N1-methylpseudouridine
  modified_base 4464: mod_base = OTHER; note = N1-methylpseudouridine
  modified_base 4467: mod_base = OTHER; note = N1-methylpseudouridine
  modified_base 4476: mod_base = OTHER; note = N1-methylpseudouridine
  modified_base 4484: mod_base = OTHER; note = N1-methylpseudouridine
  modified_base 4485: mod_base = OTHER; note = N1-methylpseudouridine
  modified_base 4497: mod_base = OTHER; note = N1-methylpseudouridine
  modified_base 4500: mod_base = OTHER; note = N1-methylpseudouridine
  modified_base 4503: mod_base = OTHER; note = N1-methylpseudouridine
  modified_base 4518: mod_base = OTHER; note = N1-methylpseudouridine
  modified_base 4527: mod_base = OTHER; note = N1-methylpseudouridine
  modified_base 4530: mod_base = OTHER; note = N1-methylpseudouridine
  modified_base 4538: mod_base = OTHER; note = N1-methylpseudouridine
  modified_base 4563: mod_base = OTHER; note = N1-methylpseudouridine
  modified_base 4584: mod_base = OTHER; note = N1-methylpseudouridine
  modified_base 4587: mod_base = OTHER; note = N1-methylpseudouridine
  modified_base 4593: mod_base = OTHER; note = N1-methylpseudouridine
  modified_base 4595: mod_base = OTHER; note = N1-methylpseudouridine
  modified_base 4596: mod_base = OTHER; note = N1-methylpseudouridine
  modified_base 4602: mod_base = OTHER; note = N1-methylpseudouridine
  modified_base 4611: mod_base = OTHER; note = N1-methylpseudouridine
  modified_base 4628: mod_base = OTHER; note = N1-methylpseudouridine
  modified_base 4629: mod_base = OTHER; note = N1-methylpseudouridine
  modified_base 4634: mod_base = OTHER; note = N1-methylpseudouridine
  modified_base 4637: mod_base = OTHER; note = N1-methylpseudouridine
  modified_base 4638: mod_base = OTHER; note = N1-methylpseudouridine
  modified_base 4650: mod_base = OTHER; note = N1-methylpseudouridine
  modified_base 4664: mod_base = OTHER; note = N1-methylpseudouridine
  modified_base 4683: mod_base = OTHER; note = N1-methylpseudouridine
  modified_base 4686: mod_base = OTHER; note = N1-methylpseudouridine
  modified_base 4698: mod_base = OTHER; note = N1-methylpseudouridine
  modified_base 4701: mod_base = OTHER; note = N1-methylpseudouridine
  modified_base 4713: mod_base = OTHER; note = N1-methylpseudouridine
  modified_base 4722: mod_base = OTHER; note = N1-methylpseudouridine
  modified_base 4724: mod_base = OTHER; note = N1-methylpseudouridine
  modified_base 4737: mod_base = OTHER; note = N1-methylpseudouridine
  modified_base 4743: mod_base = OTHER; note = N1-methylpseudouridine
  modified_base 4752: mod_base = OTHER; note = N1-methylpseudouridine
  modified_base 4799: mod_base = OTHER; note = N1-methylpseudouridine
  modified_base 4800: mod_base = OTHER; note = N1-methylpseudouridine
  modified_base 4827: mod_base = OTHER; note = N1-methylpseudouridine
  modified_base 4829: mod_base = OTHER; note = N1-methylpseudouridine
  modified_base 4834: mod_base = OTHER; note = N1-methylpseudouridine
  modified_base 4836: mod_base = OTHER; note = N1-methylpseudouridine
  modified_base 4845: mod_base = OTHER; note = N1-methylpseudouridine
  modified_base 4846: mod_base = OTHER; note = N1-methylpseudouridine
  modified_base 4848: mod_base = OTHER; note = N1-methylpseudouridine
  modified_base 4850: mod_base = OTHER; note = N1-methylpseudouridine
  modified_base 4851: mod_base = OTHER; note = N1-methylpseudouridine
  modified_base 4863: mod_base = OTHER; note = N1-methylpseudouridine
  modified_base 4868: mod_base = OTHER; note = N1-methylpseudouridine
  modified_base 4870: mod_base = OTHER; note = N1-methylpseudouridine
  modified_base 4882: mod_base = OTHER; note = N1-methylpseudouridine
  modified_base 4889: mod_base = OTHER; note = N1-methylpseudouridine
  modified_base 4892: mod_base = OTHER; note = N1-methylpseudouridine
  modified_base 4898: mod_base = OTHER; note = N1-methylpseudouridine
  modified_base 4901: mod_base = OTHER; note = N1-methylpseudouridine
  modified_base 4903: mod_base = OTHER; note = N1-methylpseudouridine
  modified_base 4907: mod_base = OTHER; note = N1-methylpseudouridine
  modified_base 4914: mod_base = OTHER; note = N1-methylpseudouridine
  modified_base 4916: mod_base = OTHER; note = N1-methylpseudouridine
  modified_base 4917: mod_base = OTHER; note = N1-methylpseudouridine
  modified_base 4918: mod_base = OTHER; note = N1-methylpseudouridine
  modified_base 4921: mod_base = OTHER; note = N1-methylpseudouridine
  modified_base 4926: mod_base = OTHER; note = N1-methylpseudouridine
  modified_base 4930: mod_base = OTHER; note = N1-methylpseudouridine
  modified_base 4933: mod_base = OTHER; note = N1-methylpseudouridine
  modified_base 4937: mod_base = OTHER; note = N1-methylpseudouridine
  modified_base 4941: mod_base = OTHER; note = N1-methylpseudouridine
  modified_base 4945: mod_base = OTHER; note = N1-methylpseudouridine
  modified_base 4947: mod_base = OTHER; note = N1-methylpseudouridine
aggactcctccccatcctctccctctgtccctctgtccctctgaccctgcactgtcccagcaccatgagcgaggtggagttcagccacgagtactggatgcgccacgccctgaccctggccaagcgcgcccgcgacgagcgcgaggtgcccgtgggcgccgtgctggtgctgaacaaccgcgtgatcggcgagggctggaaccgcgccatcggcctgcacgaccccaccgcccacgccgagatcatggccctgcgccagggcggcctggtgatgcagaactaccgcctgatcgacgccaccctgtacgtgaccttcgagccctgcgtgatgtgcgccggcgccatgatccacagccgcatcggccgcgtggtgttcggcgtgcgcaacgccaagaccggcgccgccggcagcctgatggacgtgctgcaccaccccggcatgaaccaccgcgtggagatcaccgagggcatcctggccgacgagtgcgccgccctgctgtgccgcttcttccgcatgccccgccgcgtgttcaacgcccagaagaaggcccagagcagcaccgacagcggcggcagcagcggcggcagcagcggcagcgagacacccggcaccagcgagagcgccacccccgagagcagcggcggcagcagcggcggcagcgacaagaagtacagcatcggcctggccatcggcaccaacagcgtgggctgggccgtgatcaccgacgagtacaaggtgcccagcaagaagttcaaggtgctgggcaacaccgaccgccacagcatcaagaagaacctgatcggcgccctgctgttcgacagcggcgagacagccgaggccacccgcctgaagcgcaccgcccgccgccgctacacccgccgcaagaaccgcatctgctacctgcaggagatcttcagcaacgagatggccaaggtggacgacagcttcttccaccgcctggaggagagcttcctggtggaggaggacaagaagcacgagcgccaccccatcttcggcaacatcgtggacgaggtggcctaccacgagaagtaccccaccatctaccacctgcgcaagaagctggtggacagcaccgacaaggccgacctgcgcctgatctacctggccctggcccacatgatcaagttccgcggccacttcctgatcgagggcgacctgaaccccgacaacagcgacgtggacaagctgttcatccagctggtgcagacctacaaccagctgttcgaggagaaccccatcaacgccagcggcgtggacgccaaggccatcctgagcgcccgcctgagcaagagccgccgcctggagaacctgatcgcccagctgcccggcgagaagaagaacggcctgttcggcaacctgatcgccctgagcctgggcctgacccccaacttcaagagcaacttcgacctggccgaggacgccaagctgcagctgagcaaggacacctacgacgacgacctggacaacctgctggcccagatcggcgaccagtacgccgacctgttcctggccgccaagaacctgagcgacgccatcctgctgagcgacatcctgcgcgtgaacaccgagatcaccaaggcccccctgagcgccagcatgatcaagcgctacgacgagcaccaccaggacctgaccctgctgaaggccctggtgcgccagcagctgcccgagaagtacaaggagatcttcttcgaccagagcaagaacggctacgccggctacatcgacggcggcgccagccaggaggagttctacaagttcatcaagcccatcctggagaagatggacggcaccgaggagctgctggtgaagctgaaccgcgaggacctgctgcgcaagcagcgcaccttcgacaacggcagcatcccccaccagatccacctgggcgagctgcacgccatcctgcgccgccaggaggacttctaccccttcctgaaggacaaccgcgagaagatcgagaagatcctgaccttccgcatcccctactacgtgggccccctggcccgcggcaacagccgcttcgcctggatgacccgcaagagcgaggagacaatcaccccctggaacttcgaggaggtggtggacaagggcgccagcgcccagagcttcatcgagcgcatgaccaacttcgacaagaacctgcccaacgagaaggtgctgcccaagcacagcctgctgtacgagtacttcaccgtgtacaacgagctgaccaaggtgaagtacgtgaccgagggcatgcgcaagcccgccttcctgagcggcgagcagaagaaggccatcgtggacctgctgttcaagaccaaccgcaaggtgaccgtgaagcagctgaaggaggactacttcaagaagatcgagtgcttcgacagcgtggagatcagcggcgtggaggaccgcttcaacgccagcctgggcacctaccacgacctgctgaagatcatcaaggacaaggacttcctggacaacgaggagaacgaggacatcctggaggacatcgtgctgaccctgaccctgttcgaggaccgcgagatgatcgaggagcgcctgaagacctacgcccacctgttcgacgacaaggtgatgaagcagctgaagcgccgccgctacaccggctggggccgcctgagccgcaagctgatcaacggcatccgcgacaagcagagcggcaagaccatcctggacttcctcaagagcgacggcttcgccaaccgcaacttcatgcagctgatccacgacgacagcctgaccttcaaggaggacatccagaaggcccaggtgagcggccagggcgacagcctgcacgagcacatcgccaacctggccggcagccccgccatcaagaagggcatcctgcagaccgtgaaggtggtggacgagctggtgaaggtgatgggccgccacaagcccgagaacatcgtgatcgagatggcccgcgagaaccagaccacccagaagggccagaagaacagccgcgagcgcatgaagcgcatcgaggagggcatcaaggagctgggcagccagatcctgaaggagcaccccgtggagaacacccagctgcagaacgagaagctgtacctgtactacctgcagaacggccgcgacatgtacgtggaccaggagctggacatcaaccgcctgagcgactacgacgtggaccacatcgtgccccagagcttcctgaaggacgacagcatcgacaacaaggtgctgacccgcagcgacaagaaccgcggcaagagcgacaacgtgcccagcgaggaggtggtgaagaagatgaagaactactggcgccagctgctgaacgccaagctgatcacccagcgcaagttcgacaacctgaccaaggccgagcgcggcggcctgagcgagctggacaaggccggcttcatcaagcgccagctggtggagacacgccagatcaccaagcacgtggcccagatcctggacagccgcatgaacaccaagtacgacgagaacgacaagctgatccgcgaggtgaaggtgatcaccctcaagagcaagctggtgagcgacttccgcaaggacttccagttctacaaggtgcgcgagatcaacaactaccaccacgcccacgacgcctacctgaacgccgtggtgggcaccgccctgatcaagaagtaccccaagctggagagcgagttcgtgtacggcgactacaaggtgtacgacgtgcgcaagatgatcgccaagagcgagcaggagatcggcaaggccaccgccaagtacttcttctacagcaacatcatgaacttcttcaagaccgagatcaccctggccaacggcgagatccgcaagcgccccctgatcgagacaaacggcgagacaggcgagatcgtgtgggacaagggccgcgacttcgccaccgtgcgcaaggtgctgagcatgccccaggtgaacatcgtgaagaagaccgaggtgcagaccggcggcttcagcaaggagagcatcctgcccaagcgcaacagcgacaagctgatcgcccgcaagaaggactgggaccccaagaagtacggcggcttcgacagccccaccgtggcctacagcgtgctggtggtggccaaggtggagaagggcaagagcaagaagctcaagagcgtgaaggagctgctgggcatcaccatcatggagcgcagcagcttcgagaagaaccccatcgacttcctggaggccaagggctacaaggaggtgaagaaggacctgatcatcaagctgcccaagtacagcctgttcgagctggagaacggccgcaagcgcatgctggccagcgccggcgagctgcagaagggcaacgagctggccctgcccagcaagtacgtgaacttcctgtacctggccagccactacgagaagctgaagggcagccccgaggacaacgagcagaagcagctgttcgtggagcagcacaagcactacctggacgagatcatcgagcagatcagcgagttcagcaagcgcgtgatcctggccgacgccaacctggacaaggtgctgagcgcctacaacaagcaccgcgacaagcccatccgcgagcaggccgagaacatcatccacctgttcaccctgaccaacctgggcgcccccgccgccttcaagtacttcgacaccaccatcgaccgcaagcgctacaccagcaccaaggaggtgctggacgccaccctgatccaccagagcatcaccggcctgtacgagacacgcatcgacctgagccagctgggcggcgacgagggcgccgacaagcgcaccgccgacggcagcgagttcgagagccccaagaagaagcgcaaggtgtaaagtgtccagaccattgtcttccaaccccagctggcctctagaacacccactggccagtcctagagctcctgtccctacccactctttgctacaataaatgctgaatgaatccatctaga

SEQ ID NO: 702 - protein, 1588 aa, synthetic construct
MSEVEFSHEYWMRHALTLAKRARDEREVPVGAVLVLNNRVIGEGWNRAIGLHDPTAHAEIMALRQGGLVMQNYRLIDATLYVTFEPCVMCAGAMIHSRIGRVVFGVRNAKTGAAGSLMDVLHHPGMNHRVEITEGILADECAALLCRFFRMPRRVFNAQKKAQSSTDSGGSSGGSSGSETPGTSESATPESSGGSSGGSDKKYSIGLAIGTNSVGWAVITDEYKVPSKKFKVLGNTDRHSIKKNLIGALLFDSGETAEATRLKRTARRRYTRRKNRICYLQEIFSNEMAKVDDSFFHRLEESFLVEEDKKHERHPIFGNIVDEVAYHEKYPTIYHLRKKLVDSTDKADLRLIYLALAHMIKFRGHFLIEGDLNPDNSDVDKLFIQLVQTYNQLFEENPINASGVDAKAILSARLSKSRRLENLIAQLPGEKKNGLFGNLIALSLGLTPNFKSNFDLAEDAKLQLSKDTYDDDLDNLLAQIGDQYADLFLAAKNLSDAILLSDILRVNTEITKAPLSASMIKRYDEHHQDLTLLKALVRQQLPEKYKEIFFDQSKNGYAGYIDGGASQEEFYKFIKPILEKMDGTEELLVKLNREDLLRKQRTFDNGSIPHQIHLGELHAILRRQEDFYPFLKDNREKIEKILTFRIPYYVGPLARGNSRFAWMTRKSEETITPWNFEEVVDKGASAQSFIERMTNFDKNLPNEKVLPKHSLLYEYFTVYNELTKVKYVTEGMRKPAFLSGEQKKAIVDLLFKTNRKVTVKQLKEDYFKKIECFDSVEISGVEDRFNASLGTYHDLLKIIKDKDFLDNEENEDILEDIVLTLTLFEDREMIEERLKTYAHLFDDKVMKQLKRRRYTGWGRLSRKLINGIRDKQSGKTILDFLKSDGFANRNFMQLIHDDSLTFKEDIQKAQVSGQGDSLHEHIANLAGSPAIKKGILQTVKVVDELVKVMGRHKPENIVIEMARENQTTQKGQKNSRERMKRIEEGIKELGSQILKEHPVENTQLQNEKLYLYYLQNGRDMYVDQELDINRLSDYDVDHIVPQSFLKDDSIDNKVLTRSDKNRGKSDNVPSEEVVKKMKNYWRQLLNAKLITQRKFDNLTKAERGGLSELDKAGFIKRQLVETRQITKHVAQILDSRMNTKYDENDKLIREVKVITLKSKLVSDFRKDFQFYKVREINNYHHAHDAYLNAVVGTALIKKYPKLESEFVYGDYKVYDVRKMIAKSEQEIGKATAKYFFYSNIMNFFKTEITLANGEIRKRPLIETNGETGEIVWDKGRDFATVRKVLSMPQVNIVKKTEVQTGGFSKESILPKRNSDKLIARKKDWDPKKYGGFDSPTVAYSVLVVAKVEKGKSKKLKSVKELLGITIMERSSFEKNPIDFLEAKGYKEVKKDLIIKLPKYSLFELENGRKRMLASAGELQKGNELALPSKYVNFLYLASHYEKLKGSPEDNEQKQLFVEQHKHYLDEIIEQISEFSKRVILADANLDKVLSAYNKHRDKPIREQAENIIHLFTLTNLGAPAAFKYFDTTIDRKRYTSTKEVLDATLIHQSITGLYETRIDLSQLGGDEGADKRTADGSEFESPKKKRKV

SEQ ID NO: 703 - RNA, 64 nt, synthetic construct
  source 1..64: mol_type = other RNA
  modified_base 6: mod_base = OTHER; note = N1-methylpseudouridine
  modified_base 9: mod_base = OTHER; note = N1-methylpseudouridine
  modified_base 15: mod_base = OTHER; note = N1-methylpseudouridine
  modified_base 18: mod_base = OTHER; note = N1-methylpseudouridine
  modified_base 20: mod_base = OTHER; note = N1-methylpseudouridine
  modified_base 24: mod_base = OTHER; note = N1-methylpseudouridine
  modified_base 26: mod_base = OTHER; note = N1-methylpseudouridine
  modified_base 28: mod_base = OTHER; note = N1-methylpseudouridine
  modified_base 32: mod_base = OTHER; note = N1-methylpseudouridine
  modified_base 34: mod_base = OTHER; note = N1-methylpseudouridine
  modified_base 36: mod_base = OTHER; note = N1-methylpseudouridine
  modified_base 40: mod_base = OTHER; note = N1-methylpseudouridine
  modified_base 42: mod_base = OTHER; note = N1-methylpseudouridine
  modified_base 48: mod_base = OTHER; note = N1-methylpseudouridine
  modified_base 53: mod_base = OTHER; note = N1-methylpseudouridine
  modified_base 55: mod_base = OTHER; note = N1-methylpseudouridine
aggactcctccccatcctctccctctgtccctctgtccctctgaccctgcactgtcccagcacc

SEQ ID NO: 704 - RNA, 501 nt, synthetic construct
  source 1..501: mol_type = other RNA
  modified_base 2: mod_base = OTHER; note = N1-methylpseudouridine
  modified_base 11: mod_base = OTHER; note = N1-methylpseudouridine
  modified_base 16: mod_base = OTHER; note = N1-methylpseudouridine
  modified_base 17: mod_base = OTHER; note = N1-methylpseudouridine
  modified_base 28: mod_base = OTHER; note = N1-methylpseudouridine
  modified_base 31: mod_base = OTHER; note = N1-methylpseudouridine
  modified_base 35: mod_base = OTHER; note = N1-methylpseudouridine
  modified_base 47: mod_base = OTHER; note = N1-methylpseudouridine
  modified_base 53: mod_base = OTHER; note = N1-methylpseudouridine
  modified_base 83: mod_base = OTHER; note = N1-methylpseudouridine
  modified_base 89: mod_base = OTHER; note = N1-methylpseudouridine
  modified_base 98: mod_base = OTHER; note = N1-methylpseudouridine
  modified_base 101: mod_base = OTHER; note = N1-methylpseudouridine
  modified_base 104: mod_base = OTHER; note = N1-methylpseudouridine
  modified_base 107: mod_base = OTHER; note = N1-methylpseudouridine
  modified_base 119: mod_base = OTHER; note = N1-methylpseudouridine
  modified_base 122: mod_base = OTHER; note = N1-methylpseudouridine
  modified_base 133: mod_base = OTHER; note = N1-methylpseudouridine
  modified_base 146: mod_base = OTHER; note = N1-methylpseudouridine
  modified_base 152: mod_base = OTHER; note = N1-methylpseudouridine
  modified_base 179: mod_base = OTHER; note = N1-methylpseudouridine
  modified_base 182: mod_base = OTHER; note = N1-methylpseudouridine
  modified_base 188: mod_base = OTHER; note = N1-methylpseudouridine
  modified_base 203: mod_base = OTHER; note = N1-methylpseudouridine
  modified_base 206: mod_base = OTHER; note = N1-methylpseudouridine
  modified_base 209: mod_base = OTHER; note = N1-methylpseudouridine
  modified_base 217: mod_base = OTHER; note = N1-methylpseudouridine
  modified_base 224: mod_base = OTHER; note = N1-methylpseudouridine
  modified_base 227: mod_base = OTHER; note = N1-methylpseudouridine
  modified_base 239: mod_base = OTHER; note = N1-methylpseudouridine
  modified_base 241: mod_base = OTHER; note = N1-methylpseudouridine
  modified_base 245: mod_base = OTHER; note = N1-methylpseudouridine
  modified_base 250: mod_base = OTHER; note = N1-methylpseudouridine
  modified_base 251: mod_base = OTHER; note = N1-methylpseudouridine
  modified_base 259: mod_base = OTHER; note = N1-methylpseudouridine
  modified_base 263: mod_base = OTHER; note = N1-methylpseudouridine
  modified_base 266: mod_base = OTHER; note = N1-methylpseudouridine
  modified_base 268: mod_base = OTHER; note = N1-methylpseudouridine
  modified_base 281: mod_base = OTHER; note = N1-methylpseudouridine
  modified_base 284: mod_base = OTHER; note = N1-methylpseudouridine
  modified_base 296: mod_base = OTHER; note = N1-methylpseudouridine
  modified_base 305: mod_base = OTHER; note = N1-methylpseudouridine
  modified_base 308: mod_base = OTHER; note = N1-methylpseudouridine
  modified_base 310: mod_base = OTHER; note = N1-methylpseudouridine
  modified_base 311: mod_base = OTHER; note = N1-methylpseudouridine
  modified_base 317: mod_base = OTHER; note = N1-methylpseudouridine
  modified_base 350: mod_base = OTHER; note = N1-methylpseudouridine
  modified_base 353: mod_base = OTHER; note = N1-methylpseudouridine
  modified_base 359: mod_base = OTHER; note = N1-methylpseudouridine
  modified_base 362: mod_base = OTHER; note = N1-methylpseudouridine
  modified_base 377: mod_base = OTHER; note = N1-methylpseudouridine
  modified_base 389: mod_base = OTHER; note = N1-methylpseudouridine
  modified_base 395: mod_base = OTHER; note = N1-methylpseudouridine
  modified_base 407: mod_base = OTHER; note = N1-methylpseudouridine
  modified_base 410: mod_base = OTHER; note = N1-methylpseudouridine
  modified_base 421: mod_base = OTHER; note = N1-methylpseudouridine
  modified_base 431: mod_base = OTHER; note = N1-methylpseudouridine
  modified_base 434: mod_base = OTHER; note = N1-methylpseudouridine
  modified_base 436: mod_base = OTHER; note = N1-methylpseudouridine
  modified_base 442: mod_base = OTHER; note = N1-methylpseudouridine
  modified_base 443: mod_base = OTHER; note = N1-methylpseudouridine
  modified_base 445: mod_base = OTHER; note = N1-methylpseudouridine
  modified_base 446: mod_base = OTHER; note = N1-methylpseudouridine
  modified_base 452: mod_base = OTHER; note = N1-methylpseudouridine
  modified_base 464: mod_base = OTHER; note = N1-methylpseudouridine
  modified_base 466: mod_base = OTHER; note = N1-methylpseudouridine
  modified_base 467: mod_base = OTHER; note = N1-methylpseudouridine
atgagcgaggtggagttcagccacgagtactggatgcgccacgccctgaccctggccaagcgcgcccgcgacgagcgcgaggtgcccgtgggcgccgtgctggtgctgaacaaccgcgtgatcggcgagggctggaaccgcgccatcggcctgcacgaccccaccgcccacgccgagatcatggccctgcgccagggcggcctggtgatgcagaactaccgcctgatcgacgccaccctgtacgtgaccttcgagccctgcgtgatgtgcgccggcgccatgatccacagccgcatcggccgcgtggtgttcggcgtgcgcaacgccaagaccggcgccgccggcagcctgatggacgtgctgcaccaccccggcatgaaccaccgcgtggagatcaccgagggcatcctggccgacgagtgcgccgccctgctgtgccgcttcttccgcatgccccgccgcgtgttcaacgcccagaagaaggcccagagcagcaccgac

SEQ ID NO: 705 - protein, 167 aa, synthetic construct; identical to SEQ ID NO: 691

SEQ ID NO: 706 - RNA, 4101 nt, synthetic construct
  source 1..4101: mol_type = other RNA
  modified_base 10: mod_base = OTHER; note = N1-methylpseudouridine
  modified_base 17: mod_base = OTHER; note = N1-methylpseudouridine
  modified_base 23: mod_base = OTHER; note = N1-methylpseudouridine
  modified_base 29: mod_base = OTHER; note = N1-methylpseudouridine
  modified_base 44: mod_base = OTHER; note = N1-methylpseudouridine
  modified_base 49: mod_base = OTHER; note = N1-methylpseudouridine
  modified_base 56: mod_base = OTHER; note = N1-methylpseudouridine
  modified_base 59: mod_base = OTHER; note = N1-methylpseudouridine
  modified_base 70: mod_base = OTHER; note = N1-methylpseudouridine
  modified_base 77: mod_base = OTHER; note = N1-methylpseudouridine
  modified_base 91: mod_base = OTHER; note = N1-methylpseudouridine
  modified_base 92: mod_base = OTHER; note = N1-methylpseudouridine
  modified_base 98: mod_base = OTHER; note = N1-methylpseudouridine
  modified_base 101: mod_base = OTHER; note = N1-methylpseudouridine
  modified_base 125: mod_base = OTHER; note = N1-methylpseudouridine
  modified_base 137: mod_base = OTHER; note = N1-methylpseudouridine
  modified_base 140: mod_base = OTHER; note = N1-methylpseudouridine
  modified_base 149: mod_base = OTHER; note = N1-methylpseudouridine
  modified_base 152: mod_base = OTHER; note = N1-methylpseudouridine
  modified_base 154: mod_base = OTHER; note = N1-methylpseudouridine
  modified_base 155: mod_base = OTHER; note = N1-methylpseudouridine
  modified_base 188: mod_base = OTHER; note = N1-methylpseudouridine
  modified_base 211: mod_base = OTHER; note = N1-methylpseudouridine
  modified_base 233: mod_base = OTHER; note = N1-methylpseudouridine
  modified_base 235: mod_base = OTHER; note = N1-methylpseudouridine
  modified_base 238: mod_base = OTHER; note = N1-methylpseudouridine
  modified_base 242: mod_base = OTHER; note = N1-methylpseudouridine
  modified_base 251: mod_base = OTHER; note = N1-methylpseudouridine
  modified_base 253: mod_base = OTHER; note = N1-methylpseudouridine
  modified_base 254: mod_base = OTHER; note = N1-methylpseudouridine
  modified_base 266: mod_base = OTHER; note = N1-methylpseudouridine
  modified_base 275: mod_base = OTHER; note = N1-methylpseudouridine
  modified_base 286: mod_base = OTHER; note = N1-methylpseudouridine
  modified_base 287: mod_base = OTHER; note = N1-methylpseudouridine
  modified_base 289: mod_base = OTHER; note = N1-methylpseudouridine
  modified_base 290: mod_base = OTHER; note = N1-methylpseudouridine
  modified_base 299: mod_base = OTHER; note = N1-methylpseudouridine
  modified_base 310: mod_base = OTHER; note = N1-methylpseudouridine
  modified_base 311: mod_base = OTHER; note = N1-methylpseudouridine
  modified_base 314: mod_base = OTHER; note = N1-methylpseudouridine
  modified_base 317: mod_base = OTHER; note = N1-methylpseudouridine
  modified_base 350: mod_base = OTHER; note = N1-methylpseudouridine
  modified_base 352: mod_base = OTHER; note = N1-methylpseudouridine
  modified_base 353: mod_base = OTHER; note = N1-methylpseudouridine
  modified_base 362: mod_base = OTHER; note = N1-methylpseudouridine
  modified_base 365: mod_base = OTHER; note = N1-methylpseudouridine
  modified_base 374: mod_base = OTHER; note = N1-methylpseudouridine
  modified_base 379: mod_base = OTHER; note = N1-methylpseudouridine
  modified_base 391: mod_base = OTHER; note = N1-methylpseudouridine
  modified_base 401: mod_base = OTHER; note = N1-methylpseudouridine
  modified_base 403: mod_base = OTHER; note = N1-methylpseudouridine
  modified_base 410: mod_base = OTHER; note = N1-methylpseudouridine
  modified_base 422: mod_base = OTHER; note = N1-methylpseudouridine
  modified_base 425: mod_base = OTHER; note = N1-methylpseudouridine
  modified_base 449: mod_base = OTHER; note = N1-methylpseudouridine
  modified_base 455: mod_base = OTHER; note = N1-methylpseudouridine
  modified_base 458: mod_base = OTHER; note = N1-methylpseudouridine
  modified_base 460: mod_base = OTHER; note = N1-methylpseudouridine
  modified_base 464: mod_base = OTHER; note = N1-methylpseudouridine
  modified_base 470: mod_base = OTHER; note = N1-methylpseudouridine
  modified_base 479: mod_base = OTHER; note = N1-methylpseudouridine
  modified_base 482: mod_base = OTHER; note = N1-methylpseudouridine
  modified_base 487: mod_base = OTHER; note = N1-methylpseudouridine
  modified_base 488: mod_base = OTHER; note = N1-methylpseudouridine
  modified_base 499: mod_base = OTHER; note = N1-methylpseudouridine
  modified_base 500: mod_base = OTHER; note = N1-methylpseudouridine
  modified_base 503: mod_base = OTHER; note = N1-methylpseudouridine
  modified_base 506: mod_base = OTHER; note = N1-methylpseudouridine
  modified_base 518: mod_base = OTHER; note = N1-methylpseudouridine
  modified_base 539: mod_base = OTHER; note = N1-methylpseudouridine
  modified_base 548: mod_base = OTHER; note = N1-methylpseudouridine
  modified_base 550: mod_base = OTHER; note = N1-methylpseudouridine
  modified_base 551: mod_base = OTHER; note = N1-methylpseudouridine
  modified_base 554: mod_base = OTHER; note = N1-methylpseudouridine
  modified_base 560: mod_base = OTHER; note = N1-methylpseudouridine
  modified_base 563: mod_base = OTHER; note = N1-methylpseudouridine
  modified_base 571: mod_base = OTHER; note = N1-methylpseudouridine
  modified_base 581: mod_base = OTHER; note = N1-methylpseudouridine
  modified_base 583: mod_base = OTHER; note = N1-methylpseudouridine
  modified_base 584: mod_base = OTHER; note = N1-methylpseudouridine
  modified_base 599: mod_base = OTHER; note = N1-methylpseudouridine
  modified_base 614: mod_base = OTHER; note = N1-methylpseudouridine
  modified_base 629: mod_base = OTHER; note = N1-methylpseudouridine
  modified_base 632: mod_base = OTHER; note = N1-methylpseudouridine
  modified_base 644: mod_base = OTHER; note = N1-methylpseudouridine
  modified_base 662: mod_base = OTHER; note = N1-methylpseudouridine
  modified_base 671: mod_base = OTHER; note = N1-methylpseudouridine
  modified_base 674: mod_base = OTHER; note = N1-methylpseudouridine
  modified_base 683: mod_base = OTHER; note = N1-methylpseudouridine
  modified_base 707: mod_base = OTHER; note = N1-methylpseudouridine
  modified_base 709: mod_base = OTHER; note = N1-methylpseudouridine
  modified_base 710: mod_base = OTHER; note = N1-methylpseudouridine
  modified_base 719: mod_base = OTHER; note = N1-methylpseudouridine
  modified_base 722: mod_base = OTHER; note = N1-methylpseudouridine
  modified_base 728: mod_base = OTHER; note = N1-methylpseudouridine
  modified_base 734: mod_base = OTHER; note = N1-methylpseudouridine
  modified_base 740: mod_base = OTHER; note = N1-methylpseudouridine
  modified_base 751: mod_base = OTHER; note = N1-methylpseudouridine
  modified_base 752: mod_base = OTHER; note = N1-methylpseudouridine
  modified_base 763: mod_base = OTHER; note = N1-methylpseudouridine
  modified_base 764: mod_base = OTHER; note = N1-methylpseudouridine
  modified_base 770: mod_base = OTHER; note = N1-methylpseudouridine
  modified_base 788: mod_base = OTHER; note = N1-methylpseudouridine
  modified_base 794: mod_base = OTHER; note = N1-methylpseudouridine
  modified_base 808: mod_base = OTHER; note = N1-methylpseudouridine
  modified_base 821: mod_base = OTHER; note = N1-methylpseudouridine
  modified_base 830: mod_base = OTHER; note = N1-methylpseudouridine
  modified_base 833: mod_base = OTHER; note = N1-methylpseudouridine
  modified_base 842: mod_base = OTHER; note = N1-methylpseudouridine
  modified_base 853: mod_base = OTHER; note = N1-methylpseudouridine
  modified_base 863: mod_base = OTHER; note = N1-methylpseudouridine
  modified_base 865: mod_base = OTHER; note = N1-methylpseudouridine
  modified_base 866: mod_base = OTHER; note = N1-methylpseudouridine
  modified_base 869: mod_base = OTHER; note = N1-methylpseudouridine
  modified_base 884: mod_base = OTHER; note = N1-methylpseudouridine
  modified_base 896: mod_base = OTHER; note = N1-methylpseudouridine
  modified_base 899: mod_base = OTHER; note = N1-methylpseudouridine
  modified_base 902: mod_base = OTHER; note = N1-methylpseudouridine
  modified_base 911: mod_base = OTHER; note = N1-methylpseudouridine
  modified_base 914: mod_base = OTHER; note = N1-methylpseudouridine
  modified_base 920: mod_base = OTHER; note = N1-methylpseudouridine
  modified_base 932: mod_base = OTHER; note = N1-methylpseudouridine
  modified_base 947: mod_base = OTHER; note = N1-methylpseudouridine
  modified_base 959: mod_base = OTHER; note = N1-methylpseudouridine
  modified_base 962: mod_base = OTHER; note = N1-methylpseudouridine
  modified_base 970: mod_base = OTHER; note = N1-methylpseudouridine
  modified_base 992: mod_base = OTHER; note = N1-methylpseudouridine
  modified_base 998: mod_base = OTHER; note = N1-methylpseudouridine
  modified_base 1001: mod_base = OTHER; note = N1-methylpseudouridine
  modified_base 1010: mod_base = OTHER; note = N1-methylpseudouridine
  modified_base 1013: mod_base = OTHER; note = N1-methylpseudouridine
  modified_base 1025: mod_base = OTHER; note = N1-methylpseudouridine
  modified_base 1036: mod_base = OTHER; note = N1-methylpseudouridine
  modified_base 1046: mod_base = OTHER; note = N1-methylpseudouridine
  modified_base 1048: mod_base = OTHER; note = N1-methylpseudouridine
  modified_base 1049: mod_base = OTHER; note = N1-methylpseudouridine
  modified_base 1051: mod_base = OTHER; note = N1-methylpseudouridine
  modified_base 1052: mod_base = OTHER; note = N1-methylpseudouridine
  modified_base 1072: mod_base = OTHER; note = N1-methylpseudouridine
  modified_base 1081: mod_base = OTHER; note = N1-methylpseudouridine
  modified_base 1085: mod_base = OTHER; note = N1-methylpseudouridine
  modified_base 1111: mod_base = OTHER; note = N1-methylpseudouridine
  modified_base 1112: mod_base = OTHER; note = N1-methylpseudouridine
  modified_base 1114: mod_base = OTHER; note = N1-methylpseudouridine
  modified_base 1120: mod_base = OTHER; note = N1-methylpseudouridine
  modified_base 1121: mod_base = OTHER; note = N1-methylpseudouridine
  modified_base 1124: mod_base = OTHER; note = N1-methylpseudouridine
  modified_base 1133: mod_base = OTHER; note = N1-methylpseudouridine
  modified_base 1136: mod_base = OTHER; note = N1-methylpseudouridine
  modified_base 1145: mod_base = OTHER; note = N1-methylpseudouridine
  modified_base 1163: mod_base = OTHER; note = N1-methylpseudouridine
  modified_base 1166: mod_base = OTHER; note = N1-methylpseudouridine
  modified_base 1169: mod_base = OTHER; note = N1-methylpseudouridine
  modified_base 1175: mod_base = OTHER; note = N1-methylpseudouridine
  modified_base 1190: mod_base = OTHER; note = N1-methylpseudouridine
  modified_base 1193: mod_base = OTHER; note = N1-methylpseudouridine
  modified_base 1210: mod_base = OTHER; note = N1-methylpseudouridine
  modified_base 1211: mod_base = OTHER; note = N1-methylpseudouridine
  modified_base 1226: mod_base = OTHER; note = N1-methylpseudouridine
  modified_base 1238: mod_base = OTHER; note = N1-methylpseudouridine
  modified_base 1244: mod_base = OTHER; note = N1-methylpseudouridine
  modified_base 1253: mod_base = OTHER; note = N1-methylpseudouridine
  modified_base 1262: mod_base = OTHER; note = N1-methylpseudouridine
  modified_base 1265: mod_base = OTHER; note = N1-methylpseudouridine
  modified_base 1282: mod_base = OTHER; note = N1-methylpseudouridine
  modified_base 1283: mod_base = OTHER; note = N1-methylpseudouridine
  modified_base 1285: mod_base = OTHER; note = N1-methylpseudouridine
  modified_base 1291: mod_base = OTHER; note = N1-methylpseudouridine
  modified_base 1292: mod_base = OTHER; note = N1-methylpseudouridine
  modified_base 1295: mod_base = OTHER; note = N1-methylpseudouridine
  modified_base 1316: mod_base = OTHER; note = N1-methylpseudouridine
  modified_base 1325: mod_base = OTHER; note = N1-methylpseudouridine
  modified_base 1328: mod_base = OTHER; note = N1-methylpseudouridine
  modified_base 1333: mod_base = OTHER; note = N1-methylpseudouridine
  modified_base 1334: mod_base = OTHER; note = N1-methylpseudouridine
  modified_base 1340: mod_base = OTHER; note = N1-methylpseudouridine
  modified_base 1345: mod_base = OTHER; note = N1-methylpseudouridine
  modified_base 1348: mod_base = OTHER; note = N1-methylpseudouridine
  modified_base 1352: mod_base = OTHER; note = N1-methylpseudouridine
  modified_base 1361: mod_base = OTHER; note = N1-methylpseudouridine
  modified_base 1381: mod_base = OTHER; note = N1-methylpseudouridine
  modified_base 1382: mod_base = OTHER; note = N1-methylpseudouridine
  modified_base 1387: mod_base = OTHER; note = N1-methylpseudouridine
  modified_base 1391: mod_base = OTHER; note = N1-methylpseudouridine
  modified_base 1415: mod_base = OTHER; note = N1-methylpseudouridine
  modified_base 1423: mod_base = OTHER; note = N1-methylpseudouridine
  modified_base 1429: mod_base = OTHER; note = N1-methylpseudouridine
  modified_base 1430: mod_base = OTHER; note = N1-methylpseudouridine
  modified_base 1439: mod_base = OTHER; note = N1-methylpseudouridine
  modified_base 1442: mod_base = OTHER; note = N1-methylpseudouridine
  modified_base 1468: mod_base = OTHER; note = N1-methylpseudouridine
  modified_base 1469: mod_base = OTHER; note = N1-methylpseudouridine
  modified_base 1472: mod_base = OTHER; note = N1-methylpseudouridine
  modified_base 1481: mod_base = OTHER; note = N1-methylpseudouridine
  modified_base 1489: mod_base = OTHER; note = N1-methylpseudouridine
  modified_base 1490: mod_base = OTHER; note = N1-methylpseudouridine
  modified_base 1502: mod_base = OTHER; note = N1-methylpseudouridine
  modified_base 1517: mod_base = OTHER; note = N1-methylpseudouridine
  modified_base 1520: mod_base = OTHER; note = N1-methylpseudouridine
  modified_base 1535: mod_base = OTHER; note = N1-methylpseudouridine
  modified_base 1538: mod_base = OTHER; note = N1-methylpseudouridine
  modified_base 1540: mod_base = OTHER; note = N1-methylpseudouridine
  modified_base 1546: mod_base = OTHER; note = N1-methylpseudouridine
  modified_base 1549: mod_base = OTHER; note = N1-methylpseudouridine
  modified_base 1550: mod_base = OTHER; note = N1-methylpseudouridine
  modified_base 1556: mod_base = OTHER; note = N1-methylpseudouridine
  modified_base 1558: mod_base = OTHER; note = N1-methylpseudouridine
  modified_base 1568: mod_base = OTHER; note = N1-methylpseudouridine
  modified_base 1577: mod_base = OTHER; note = N1-methylpseudouridine
  modified_base 1582: mod_base = OTHER; note = N1-methylpseudouridine
  modified_base 1586: mod_base = OTHER; note = N1-methylpseudouridine
  modified_base 1598: mod_base = OTHER; note = N1-methylpseudouridine
  modified_base 1612: mod_base = OTHER; note = N1-methylpseudouridine
  modified_base 1613: mod_base = OTHER; note = N1-methylpseudouridine
  modified_base 1616: mod_base = OTHER; note = N1-methylpseudouridine
  modified_base 1640: mod_base = OTHER; note = N1-methylpseudouridine
  modified_base 1643: mod_base = OTHER; note = N1-methylpseudouridine
  modified_base 1649: mod_base = OTHER; note = N1-methylpseudouridine
  modified_base 1652: mod_base = OTHER; note = N1-methylpseudouridine
  modified_base 1654: mod_base = OTHER; note = N1-methylpseudouridine
  modified_base 1655: mod_base = OTHER; note = N1-methylpseudouridine
  modified_base 1673: mod_base = OTHER; note = N1-methylpseudouridine
  modified_base 1679: mod_base = OTHER; note = N1-methylpseudouridine
  modified_base 1688: mod_base = OTHER; note = N1-methylpseudouridine
  modified_base 1699: mod_base = OTHER; note = N1-methylpseudouridine
  modified_base 1702: mod_base = OTHER; note = N1-methylpseudouridine
  modified_base 1703: mod_base = OTHER; note = N1-methylpseudouridine
  modified_base 1712: mod_base = OTHER; note = N1-methylpseudouridine
  modified_base 1717: mod_base = OTHER; note = N1-methylpseudouridine
  modified_base 1720: mod_base = OTHER; note = N1-methylpseudouridine
  modified_base 1721: mod_base = OTHER; note = N1-methylpseudouridine
  modified_base 1730: mod_base = OTHER; note = N1-methylpseudouridine
  modified_base 1736: mod_base = OTHER; note = N1-methylpseudouridine
  modified_base 1745: mod_base = OTHER; note = N1-methylpseudouridine
  modified_base 1756: mod_base = OTHER; note = N1-methylpseudouridine
  modified_base 1757: mod_base = OTHER; note = N1-methylpseudouridine
  modified_base 1769: mod_base = OTHER; note = N1-methylpseudouridine
  modified_base 1777: mod_base = OTHER; note = N1-methylpseudouridine
  modified_base 1787: mod_base = OTHER; note = N1-methylpseudouridine
  modified_base 1790: mod_base = OTHER; note = N1-methylpseudouridine
  modified_base 1796: mod_base = OTHER; note = N1-methylpseudouridine
  modified_base 1799: mod_base = OTHER; note = N1-methylpseudouridine
  modified_base 1813: mod_base = OTHER; note = N1-methylpseudouridine
  modified_base 1814: mod_base = OTHER; note = N1-methylpseudouridine
  modified_base 1817: mod_base = OTHER; note = N1-methylpseudouridine
  modified_base 1841: mod_base = OTHER; note = N1-methylpseudouridine
  modified_base 1844: mod_base = OTHER; note = N1-methylpseudouridine
  modified_base 1853: mod_base = OTHER; note = N1-methylpseudouridine
  modified_base 1856: mod_base = OTHER; note = N1-methylpseudouridine
  modified_base 1859: mod_base = OTHER; note = N1-methylpseudouridine
  modified_base 1865: mod_base = OTHER; note = N1-methylpseudouridine
  modified_base 1871: mod_base = OTHER; note = N1-methylpseudouridine
  modified_base 1873: mod_base = OTHER; note = N1-methylpseudouridine
  modified_base 1874: mod_base = OTHER; note = N1-methylpseudouridine
  modified_base 1889: mod_base = OTHER; note = N1-methylpseudouridine
  modified_base 1892: mod_base = OTHER; note = N1-methylpseudouridine
  modified_base 1904: mod_base = OTHER; note = N1-methylpseudouridine
  modified_base 1912: mod_base = OTHER; note = N1-methylpseudouridine
  modified_base 1922: mod_base = OTHER; note = N1-methylpseudouridine
  modified_base 1924: mod_base = OTHER; note = N1-methylpseudouridine
  modified_base 1925: mod_base = OTHER; note = N1-methylpseudouridine
  modified_base 1937: mod_base = OTHER; note = N1-methylpseudouridine
  modified_base 1940: mod_base = OTHER; note = N1-methylpseudouridine
  modified_base 1949: mod_base = OTHER; note = N1-methylpseudouridine
  modified_base 1963: mod_base = OTHER; note = N1-methylpseudouridine
  modified_base 1972: mod_base = OTHER; note = N1-methylpseudouridine
  modified_base 1982: mod_base = OTHER; note = N1-methylpseudouridine
  modified_base 1994: mod_base = OTHER; note = N1-methylpseudouridine
  modified_base 1997: mod_base = OTHER; note = N1-methylpseudouridine
  modified_base 2006: mod_base = OTHER; note = N1-methylpseudouridine
  modified_base 2033: mod_base = OTHER; note = N1-methylpseudouridine
  modified_base 2036: mod_base = OTHER; note = N1-methylpseudouridine
  modified_base 2041: mod_base = OTHER; note = N1-methylpseudouridine
  modified_base 2042: mod_base = OTHER; note = N1-methylpseudouridine
  modified_base 2045: mod_base = OTHER; note = N1-methylpseudouridine
  modified_base 2059: mod_base = OTHER; note = N1-methylpseudouridine
  modified_base 2060: mod_base = OTHER; note = N1-methylpseudouridine
  modified_base 2074: mod_base = OTHER; note = N1-methylpseudouridine
  modified_base 2075: mod_base = OTHER; note = N1-methylpseudouridine
  modified_base 2078: mod_base = OTHER; note = N1-methylpseudouridine
  modified_base 2084: mod_base = OTHER; note = N1-methylpseudouridine
  modified_base 2087: mod_base = OTHER; note = N1-methylpseudouridine
  modified_base 2102: mod_base = OTHER; note = N1-methylpseudouridine
  modified_base 2107: mod_base = OTHER; note = N1-methylpseudouridine
  modified_base 2108: mod_base = OTHER; note = N1-methylpseudouridine
  modified_base 2120: mod_base = OTHER; note = N1-methylpseudouridine
  modified_base 2135: mod_base = OTHER; note = N1-methylpseudouridine
  modified_base 2156: mod_base = OTHER; note = N1-methylpseudouridine
  modified_base 2168: mod_base = OTHER; note = N1-methylpseudouridine
  modified_base 2177: mod_base = OTHER; note = N1-methylpseudouridine
  modified_base 2195: mod_base = OTHER; note = N1-methylpseudouridine
  modified_base 2207: mod_base = OTHER; note = N1-methylpseudouridine
  modified_base 2210: mod_base = OTHER; note = N1-methylpseudouridine
  modified_base 2219: mod_base = OTHER; note = N1-methylpseudouridine
  modified_base 2225: mod_base = OTHER; note = N1-methylpseudouridine
  modified_base 2228: mod_base = OTHER; note = N1-methylpseudouridine
  modified_base 2237: mod_base = OTHER; note = N1-methylpseudouridine
  modified_base 2240: mod_base = OTHER; note = N1-methylpseudouridine
  modified_base 2246: mod_base = OTHER; note = N1-methylpseudouridine
  modified_base 2249: mod_base = OTHER; note = N1-methylpseudouridine
  modified_base 2273: mod_base = OTHER; note = N1-methylpseudouridine
  modified_base 2276: mod_base = OTHER; note = N1-methylpseudouridine
  modified_base 2279: mod_base = OTHER; note = N1-methylpseudouridine
  modified_base 2285: mod_base = OTHER; note = N1-methylpseudouridine
  modified_base 2339: mod_base = OTHER; note = N1-methylpseudouridine
  modified_base 2348: mod_base = OTHER; note = N1-methylpseudouridine
  modified_base 2360: mod_base = OTHER; note = N1-methylpseudouridine
  modified_base 2369: mod_base = OTHER; note = N1-methylpseudouridine
  modified_base 2381: mod_base = OTHER; note = N1-methylpseudouridine
  modified_base 2384: mod_base = OTHER; note = N1-methylpseudouridine
  modified_base 2399: mod_base = OTHER; note = N1-methylpseudouridine
  modified_base 2414: mod_base = OTHER; note = N1-methylpseudouridine
  modified_base 2429: mod_base = OTHER; note = N1-methylpseudouridine
  modified_base 2431: mod_base = OTHER; note = N1-methylpseudouridine
  modified_base 2435: mod_base = OTHER; note = N1-methylpseudouridine
  modified_base 2437: mod_base = OTHER; note = N1-methylpseudouridine
  modified_base 2440: mod_base = OTHER; note = N1-methylpseudouridine
  modified_base 2444: mod_base = OTHER; note = N1-methylpseudouridine
  modified_base 2462: mod_base = OTHER; note = N1-methylpseudouridine
  modified_base 2464: mod_base = OTHER; note = N1-methylpseudouridine
  modified_base 2468: mod_base = OTHER; note = N1-methylpseudouridine
  modified_base 2480: mod_base = OTHER; note = N1-methylpseudouridine
  modified_base 2486: mod_base = OTHER; note = N1-methylpseudouridine
  modified_base 2495: mod_base = OTHER; note = N1-methylpseudouridine
  modified_base 2503: mod_base = OTHER; note = N1-methylpseudouridine
  modified_base 2510: mod_base = OTHER; note = N1-methylpseudouridine
  modified_base 2519: mod_base = OTHER; note = N1-methylpseudouridine
  modified_base 2522: mod_base = OTHER; note = N1-methylpseudouridine
  modified_base 2533: mod_base = OTHER; note = N1-methylpseudouridine
  modified_base 2534: mod_base = OTHER; note = N1-methylpseudouridine
  modified_base 2537: mod_base = OTHER; note = N1-methylpseudouridine
  modified_base 2552: mod_base = OTHER; note = N1-methylpseudouridine
  modified_base 2564: mod_base = OTHER; note = N1-methylpseudouridine
  modified_base 2567: mod_base = OTHER; note = N1-methylpseudouridine
  modified_base 2606: mod_base = OTHER; note = N1-methylpseudouridine
  modified_base 2621: mod_base = OTHER; note = N1-methylpseudouridine
  modified_base 2624: mod_base = OTHER; note = N1-methylpseudouridine
  modified_base 2633: mod_base = OTHER; note = N1-methylpseudouridine
  modified_base 2641: mod_base = OTHER; note = N1-methylpseudouridine
  modified_base 2644: mod_base = OTHER; note = N1-methylpseudouridine
  modified_base 2654: mod_base = OTHER; note = N1-methylpseudouridine
  modified_base 2657: mod_base = OTHER; note = N1-methylpseudouridine
  modified_base 2669: mod_base = OTHER; note = N1-methylpseudouridine
  modified_base 2672: mod_base = OTHER; note = N1-methylpseudouridine
  modified_base 2686: mod_base = OTHER; note = N1-methylpseudouridine
  modified_base 2687: mod_base = OTHER; note = N1-methylpseudouridine
  modified_base 2696: mod_base = OTHER; note = N1-methylpseudouridine
  modified_base 2720: mod_base = OTHER; note = N1-methylpseudouridine
  modified_base 2729: mod_base = OTHER; note = N1-methylpseudouridine
  modified_base 2743: mod_base = OTHER; note = N1-methylpseudouridine
  modified_base 2744: mod_base = OTHER; note = N1-methylpseudouridine
  modified_base 2747: mod_base = OTHER; note = N1-methylpseudouridine
  modified_base 2759: mod_base = OTHER; note = N1-methylpseudouridine
  modified_base 2762: mod_base = OTHER; note = N1-methylpseudouridine
  modified_base 2777: mod_base = OTHER; note = N1-methylpseudouridine
  modified_base 2789: mod_base = OTHER; note = N1-methylpseudouridine
  modified_base 2798: mod_base = OTHER; note = N1-methylpseudouridine
  modified_base 2801: mod_base = OTHER; note = N1-methylpseudouridine
  modified_base 2813: mod_base = OTHER; note = N1-methylpseudouridine
  modified_base 2824: mod_base = OTHER; note = N1-methylpseudouridine
  modified_base 2843: mod_base = OTHER; note = N1-methylpseudouridine
  modified_base 2846: mod_base = OTHER; note = N1-methylpseudouridine
  modified_base 2855: mod_base = OTHER; note = N1-methylpseudouridine
  modified_base 2861: mod_base = OTHER; note = N1-methylpseudouridine
  modified_base 2864: mod_base = OTHER; note = N1-methylpseudouridine
  modified_base 2870: mod_base = OTHER; note = N1-methylpseudouridine
  modified_base 2882: mod_base = OTHER; note = N1-methylpseudouridine
  modified_base 2885: mod_base = OTHER; note = N1-methylpseudouridine
  modified_base 2893: mod_base = OTHER; note = N1-methylpseudouridine
  modified_base 2894: mod_base = OTHER; note = N1-methylpseudouridine
  modified_base 2905: mod_base = OTHER; note = N1-methylpseudouridine
  modified_base 2906: mod_base = OTHER; note = N1-methylpseudouridine
  modified_base 2911: mod_base = OTHER; note = N1-methylpseudouridine
  modified_base 2912: mod_base = OTHER; note = N1-methylpseudouridine
  modified_base 2914: mod_base = OTHER; note = N1-methylpseudouridine
  modified_base 2921: mod_base = OTHER; note = N1-methylpseudouridine
  modified_base 2930: mod_base = OTHER; note = N1-methylpseudouridine
  modified_base 2938: mod_base = OTHER; note = N1-methylpseudouridine
  modified_base 2959: mod_base = OTHER; note = N1-methylpseudouridine
  modified_base 2963: mod_base = OTHER; note = N1-methylpseudouridine
  modified_base 2972: mod_base = OTHER; note = N1-methylpseudouridine
  modified_base 2975: mod_base = OTHER; note = N1-methylpseudouridine
  modified_base 2987: mod_base = OTHER; note = N1-methylpseudouridine
  modified_base 2990: mod_base = OTHER; note = N1-methylpseudouridine
  modified_base 2998: mod_base = OTHER; note = N1-methylpseudouridine
  modified_base 3008: mod_base = OTHER; note = N1-methylpseudouridine
  modified_base 3019: mod_base = OTHER; note = N1-methylpseudouridine
  modified_base 3020: mod_base = OTHER; note = N1-methylpseudouridine
  modified_base 3023: mod_base = OTHER; note = N1-methylpseudouridine
  modified_base 3025: mod_base = OTHER; note = N1-methylpseudouridine
  modified_base 3034: mod_base = OTHER; note = N1-methylpseudouridine
  modified_base 3041: mod_base = OTHER; note = N1-methylpseudouridine
  modified_base 3043: mod_base = OTHER; note = N1-methylpseudouridine
  modified_base 3050: mod_base = OTHER; note = N1-methylpseudouridine
  modified_base 3059: mod_base = OTHER; note = N1-methylpseudouridine
  modified_base 3062: mod_base = OTHER; note = N1-methylpseudouridine
  modified_base 3083: mod_base = OTHER; note = N1-methylpseudouridine
  modified_base 3103: mod_base = OTHER; note = N1-methylpseudouridine
  modified_base 3106: mod_base = OTHER; note = N1-methylpseudouridine
  modified_base 3107: mod_base = OTHER; note = N1-methylpseudouridine
  modified_base 3109: mod_base = OTHER; note = N1-methylpseudouridine
  modified_base 3110: mod_base = OTHER; note = N1-methylpseudouridine
  modified_base 3112: mod_base = OTHER; note = N1-methylpseudouridine
  modified_base 3122: mod_base = OTHER; note = N1-methylpseudouridine
  modified_base 3125: mod_base = OTHER; note = N1-methylpseudouridine
  modified_base 3130: mod_base = OTHER; note = N1-methylpseudouridine
  modified_base 3131: mod_base = OTHER; note = N1-methylpseudouridine
  modified_base 3133: mod_base = OTHER; note = N1-methylpseudouridine
  modified_base 3134: mod_base = OTHER; note = N1-methylpseudouridine
  modified_base 3146: mod_base = OTHER; note = N1-methylpseudouridine
  modified_base 3152: mod_base = OTHER; note = N1-methylpseudouridine
  modified_base 3167: mod_base = OTHER; note = N1-methylpseudouridine
  modified_base 3182: mod_base = OTHER; note = N1-methylpseudouridine
  modified_base 3185: mod_base = OTHER; note = N1-methylpseudouridine
  modified_base 3212: mod_base = OTHER; note = N1-methylpseudouridine
  modified_base 3215: mod_base = OTHER; note = N1-methylpseudouridine
  modified_base 3217: mod_base = OTHER; note = N1-methylpseudouridine
  modified_base 3235: mod_base = OTHER; note = N1-methylpseudouridine
  modified_base 3236: mod_base = OTHER; note = N1-methylpseudouridine
  modified_base 3245: mod_base = OTHER; note = N1-methylpseudouridine
  modified_base 3254: mod_base = OTHER; note = N1-methylpseudouridine
  modified_base 3257: mod_base = OTHER; note = N1-methylpseudouridine
  modified_base 3263: mod_base = OTHER; note = N1-methylpseudouridine
  modified_base 3272: mod_base = OTHER; note = N1-methylpseudouridine
  modified_base 3278: mod_base = OTHER; note = N1-methylpseudouridine
  modified_base 3281: mod_base = OTHER; note = N1-methylpseudouridine
  modified_base 3296: mod_base = OTHER; note = N1-methylpseudouridine
  modified_base 3310: mod_base = OTHER; note = N1-methylpseudouridine
  modified_base 3311: mod_base = OTHER; note = N1-methylpseudouridine
  modified_base 3326: mod_base = OTHER; note = N1-methylpseudouridine
  modified_base 3329: mod_base = OTHER; note = N1-methylpseudouridine
  modified_base 3353: mod_base = OTHER; note = N1-methylpseudouridine
  modified_base 3356: mod_base = OTHER; note = N1-methylpseudouridine
  modified_base 3373: mod_base = OTHER; note = N1-methylpseudouridine
  modified_base 3388: mod_base = OTHER; note = N1-methylpseudouridine
  modified_base 3397: mod_base = OTHER; note = N1-methylpseudouridine
  modified_base 3398: mod_base = OTHER; note = N1-methylpseudouridine
  modified_base 3413: mod_base = OTHER; note = N1-methylpseudouridine
  modified_base 3418: mod_base = OTHER; note = N1-methylpseudouridine
  modified_base 3425: mod_base = OTHER; note = N1-methylpseudouridine
  modified_base 3428: mod_base = OTHER; note = N1-methylpseudouridine
  modified_base 3431: mod_base = OTHER; note = N1-methylpseudouridine
  modified_base 3434: mod_base = OTHER; note = N1-methylpseudouridine
  modified_base 3443: mod_base = OTHER; note = N1-methylpseudouridine
  modified_base 3467: mod_base = OTHER; note = N1-methylpseudouridine
  modified_base 3476: mod_base = OTHER; note = N1-methylpseudouridine
  modified_base 3485: mod_base = OTHER; note = N1-methylpseudouridine
  modified_base 3488: mod_base = OTHER; note = N1-methylpseudouridine
  modified_base 3494: mod_base = OTHER; note = N1-methylpseudouridine
  modified_base 3500: mod_base = OTHER; note = N1-methylpseudouridine
  modified_base 3503: mod_base = OTHER; note = N1-methylpseudouridine
  modified_base 3517: mod_base = OTHER; note = N1-methylpseudouridine
  modified_base 3518: mod_base = OTHER; note = N1-methylpseudouridine
  modified_base 3533: mod_base = OTHER; note = N1-methylpseudouridine
  modified_base 3538: mod_base = OTHER; note = N1-methylpseudouridine
  modified_base 3539: mod_base = OTHER; note = N1-methylpseudouridine
  modified_base 3542: mod_base = OTHER; note = N1-methylpseudouridine
  modified_base 3556: mod_base = OTHER; note = N1-methylpseudouridine
  modified_base 3566: mod_base = OTHER; note = N1-methylpseudouridine
  modified_base 3578: mod_base = OTHER; note = N1-methylpseudouridine
  modified_base 3581: mod_base = OTHER; note = N1-methylpseudouridine
  modified_base 3584: mod_base = OTHER; note = N1-methylpseudouridine
  modified_base 3590: mod_base = OTHER; note = N1-methylpseudouridine
  modified_base 3598: mod_base = OTHER; note = N1-methylpseudouridine
  modified_base 3605: mod_base = OTHER; note = N1-methylpseudouridine
  modified_base 3607: mod_base = OTHER; note = N1-methylpseudouridine
  modified_base 3608: mod_base = OTHER; note = N1-methylpseudouridine
  modified_base 3614: mod_base = OTHER; note = N1-methylpseudouridine
  modified_base 3635: mod_base = OTHER; note = N1-methylpseudouridine
  modified_base 3638: mod_base = OTHER; note = N1-methylpseudouridine
  modified_base 3656: mod_base = OTHER; note = N1-methylpseudouridine
  modified_base 3674: mod_base = OTHER; note = N1-methylpseudouridine
  modified_base 3680: mod_base = OTHER; note = N1-methylpseudouridine
  modified_base 3691: mod_base = OTHER; note = N1-methylpseudouridine
  modified_base 3695: mod_base = OTHER; note = N1-methylpseudouridine
  modified_base 3700: mod_base = OTHER; note = N1-methylpseudouridine
  modified_base 3701: mod_base = OTHER; note = N1-methylpseudouridine
  modified_base 3704: mod_base = OTHER; note = N1-methylpseudouridine
  modified_base 3706: mod_base = OTHER; note = N1-methylpseudouridine
  modified_base 3710: mod_base = OTHER; note = N1-methylpseudouridine
  modified_base 3721: mod_base = OTHER; note = N1-methylpseudouridine
  modified_base 3731: mod_base = OTHER; note = N1-methylpseudouridine
  modified_base 3767: mod_base = OTHER; note = N1-methylpseudouridine
  modified_base 3769: mod_base = OTHER; note = N1-methylpseudouridine
  modified_base 3770: mod_base = OTHER; note = N1-methylpseudouridine
  modified_base 3773: mod_base = OTHER; note = N1-methylpseudouridine
  modified_base 3790: mod_base = OTHER; note = N1-methylpseudouridine
  modified_base 3794: mod_base = OTHER; note = N1-methylpseudouridine
  modified_base 3803: mod_base = OTHER; note = N1-methylpseudouridine
  modified_base 3806: mod_base = OTHER; note = N1-methylpseudouridine
  modified_base 3815: mod_base = OTHER; note = N1-methylpseudouridine
  modified_base 3823: mod_base = OTHER; note = N1-methylpseudouridine
  modified_base 3824: mod_base = OTHER; note = N1-methylpseudouridine
  modified_base 3836: mod_base = OTHER; note = N1-methylpseudouridine
  modified_base 3839: mod_base = OTHER; note = N1-methylpseudouridine
  modified_base 3842: mod_base = OTHER; note = N1-methylpseudouridine
  modified_base 3857: mod_base = OTHER; note = N1-methylpseudouridine
  modified_base 3866: mod_base = OTHER; note = N1-methylpseudouridine
  modified_base 3869: mod_base = OTHER; note = N1-methylpseudouridine
  modified_base 3877: mod_base = OTHER; note = N1-methylpseudouridine
  modified_base 3902: mod_base = OTHER; note = N1-methylpseudouridine
  modified_base 3923: mod_base = OTHER; note = N1-methylpseudouridine
  modified_base 3926: mod_base = OTHER; note = N1-methylpseudouridine
  modified_base 3932: mod_base = OTHER; note = N1-methylpseudouridine
  modified_base 3934: mod_base = OTHER; note = N1-methylpseudouridine
  modified_base 3935: mod_base = OTHER; note = N1-methylpseudouridine
  modified_base 3941: mod_base = OTHER; note = N1-methylpseudouridine
  modified_base 3950: mod_base = OTHER; note = N1-methylpseudouridine
  modified_base 3967: mod_base = OTHER; note = N1-methylpseudouridine
  modified_base 3968: mod_base = OTHER; note = N1-methylpseudouridine
  modified_base 3973: mod_base = OTHER; note = N1-methylpseudouridine
  modified_base 3976: mod_base = OTHER; note = N1-methylpseudouridine
  modified_base 3977: mod_base = OTHER; note = N1-methylpseudouridine
  modified_base 3989: mod_base = OTHER; note = N1-methylpseudouridine
  modified_base 4003: mod_base = OTHER; note = N1-methylpseudouridine
  modified_base 4022: mod_base = OTHER; note = N1-methylpseudouridine
  modified_base 4025: mod_base = OTHER; note = N1-methylpseudouridine
  modified_base 4037: mod_base = OTHER; note = N1-methylpseudouridine
  modified_base 4040: mod_base = OTHER; note = N1-methylpseudouridine
  modified_base 4052: mod_base = OTHER; note = N1-methylpseudouridine
  modified_base 4061: mod_base = OTHER; note = N1-methylpseudouridine
  modified_base 4063: mod_base = OTHER; note = N1-methylpseudouridine
  modified_base 4076: mod_base = OTHER; note = N1-methylpseudouridine
  modified_base 4082: mod_base = OTHER; note = N1-methylpseudouridine
  modified_base 4091: mod_base = OTHER; note = N1-methylpseudouridine
gacaagaagtacagcatcggcctggccatcggcaccaacagcgtgggctgggccgtgatcaccgacgagtacaaggtgcccagcaagaagttcaaggtgctgggcaacaccgaccgccacagcatcaagaagaacctgatcggcgccctgctgttcgacagcggcgagacagccgaggccacccgcctgaagcgcaccgcccgccgccgctacacccgccgcaagaaccgcatctgctacctgcaggagatcttcagcaacgagatggccaaggtggacgacagcttcttccaccgcctggaggagagcttcctggtggaggaggacaagaagcacgagcgccaccccatcttcggcaacatcgtggacgaggtggcctaccacgagaagtaccccaccatctaccacctgcgcaagaagctggtggacagcaccgacaaggccgacctgcgcctgatctacctggccctggcccacatgatcaagttccgcggccacttcctgatcgagggcgacctgaaccccgacaacagcgacgtggacaagctgttcatccagctggtgcagacctacaaccagctgttcgaggagaaccccatcaacgccagcggcgtggacgccaaggccatcctgagcgcccgcctgagcaagagccgccgcctggagaacctgatcgcccagctgcccggcgagaagaagaacggcctgttcggcaacctgatcgccctgagcctgggcctgacccccaacttcaagagcaacttcgacctggccgaggacgccaagctgcagctgagcaaggacacctacgacgacgacctggacaacctgctggcccagatcggcgaccagtacgccgacctgttcctggccgccaagaacctgagcgacgccatcctgctgagcgacatcctgcgcgtgaacaccgagatcaccaaggcccccctgagcgccagcatgatcaagcgctacgacgagcaccaccaggacctgaccctgctgaaggccctggtgcgccagcagctgcccgagaagtacaaggagatcttcttcgaccagagcaagaacggctacgccggctacatcgacggcggcgccagccaggaggagttctacaagttcatcaagcccatcctggagaagatggacggcaccgaggagctgctggtgaagctgaaccgcgaggacctgctgcgcaagcagcgcaccttcgacaacggcagcatcccccaccagatccacctgggcgagctgcacgccatcctgcgccgccaggaggacttctaccccttcctgaaggacaaccgcgagaagatcgagaagatcctgaccttccgcatcccctactacgtgggccccctggcccgcggcaacagccgcttcgcctggatgacccgcaagagcgaggagacaatcaccccctggaacttcgaggaggtggtggacaagggcgccagcgcccagagcttcatcgagcgcatgaccaacttcgacaagaacctgcccaacgagaaggtgctgcccaagcacagcctgctgtacgagtacttcaccgtgtacaacgagctgaccaaggtgaagtacgtgaccgagggcatgcgcaagcccgccttcctgagcggcgagcagaagaaggccatcgtggacctgctgttcaagaccaaccgcaaggtgaccgtgaagcagctgaaggaggactacttcaagaagatcgagtgcttcgacagcgtggagatcagcggcgtggaggaccgcttcaacgccagcctgggcacctaccacgacctgctgaagatcatcaaggacaaggacttcctggacaacgaggagaacgaggacatcctggaggacatcgtgctgaccctgaccctgttcgaggaccgcgagatgatcgaggagcgcctgaagacctacgcccacctgttcgacgacaaggtgatgaagcagctgaagcgccgccgctacaccggctggggccgcctgagccgcaagctgatcaacggcatccgcgacaagcagagcggcaagaccatcctggacttcctcaagagcgacggcttcgccaaccgcaacttcatgcagctgatccacgacgacagcctgaccttcaaggaggacatccagaaggcccaggtgagcggccagggcgacagcctgcacgagcacatcgccaacctggccggcagccccgccatcaagaagggcatcctgcagaccgtgaaggtggtggacgagctggtgaaggtgatgggccgccacaagcccgagaacatcgtgatcgagatggcccgcgagaaccagaccacccagaagggccagaagaacagccgcgagcgcatgaagcgcatcgaggagggcatcaaggagctgggcagccagatcctgaaggagcaccccgtggagaacacccagctgcagaacgagaagctgtacctgtactacctgcagaacggccgcgacatgtacgtggaccaggagctggacatcaaccgcctgagcgactacgacgtggaccacatcgtgccccagagcttcctgaaggacgacagcatcgacaacaaggtgctgacccgcagcgacaagaaccgcggcaagagcgacaacgtgcccagcgaggaggtggtgaagaagatgaagaactactggcgccagctgctgaacgccaagctgatcacccagcgcaagttcgacaacctgaccaaggccgagcgcggcggcctgagcgagctggacaaggccggcttcatcaagcgccagctggtggagacacgccagatcaccaagcacgtggcccagatcctggacagccgcatgaacaccaagtacgacgagaacgacaagctgatccgcgaggtgaaggtgatcaccctcaagagcaagctggtgagcgacttccgcaaggacttccagttctacaaggtgcgcgagatcaacaactaccaccacgcccacgacgcctacctgaacgccgtggtgggcaccgccctgatcaagaagtaccccaagctggagagcgagttcgtgtacggcgactacaaggtgtacgacgtgcgcaagatgatcgccaagagcgagcaggagatcggcaaggccaccgccaagtacttcttctacagcaacatcatgaacttcttcaagaccgagatcaccctggccaacggcgagatccgcaagcgccccctgatcgagacaaacggcgagacaggcgagatcgtgtgggacaagggccgcgacttcgccaccgtgcgcaaggtgctgagcatgccccaggtgaacatcgtgaagaagaccgaggtgcagaccggcggcttcagcaaggagagcatcctgcccaagcgcaacagcgacaagctgatcgcccgcaagaaggactgggaccccaagaagtacggcggcttcgacagccccaccgtggcctacagcgtgctggtggtggccaaggtggagaagggcaagagcaagaagctcaagagcgtgaaggagctgctgggcatcaccatcatggagcgcagcagcttcgagaagaaccccatcgacttcctggaggccaagggctacaaggaggtgaagaaggacctgatcatcaagctgcccaagtacagcctgttcgagctggagaacggccgcaagcgcatgctggccagcgccggcgagctgcagaagggcaacgagctggccctgcccagcaagtacgtgaacttcctgtacctggccagccactacgagaagctgaagggcagccccgaggacaacgagcagaagcagctgttcgtggagcagcacaagcactacctggacgagatcatcgagcagatcagcgagttcagcaagcgcgtgatcctggccgacgccaacctggacaaggtgctgagcgcctacaacaagcaccgcgacaagcccatccgcgagcaggccgagaacatcatccacctgttcaccctgaccaacctgggcgcccccgccgccttcaagtacttcgacaccaccatcgaccgcaagcgctacaccagcaccaaggaggtgctggacgccaccctgatccaccagagcatcaccggcctgtacgagacacgcatcgacctgagccagctgggcggcgac

SEQ ID NO: 707 - protein, 1367 aa, synthetic construct
DKKYSIGLAIGTNSVGWAVITDEYKVPSKKFKVLGNTDRHSIKKNLIGALLFDSGETAEATRLKRTARRRYTRRKNRICYLQEIFSNEMAKVDDSFFHRLEESFLVEEDKKHERHPIFGNIVDEVAYHEKYPTIYHLRKKLVDSTDKADLRLIYLALAHMIKFRGHFLIEGDLNPDNSDVDKLFIQLVQTYNQLFEENPINASGVDAKAILSARLSKSRRLENLIAQLPGEKKNGLFGNLIALSLGLTPNFKSNFDLAEDAKLQLSKDTYDDDLDNLLAQIGDQYADLFLAAKNLSDAILLSDILRVNTEITKAPLSASMIKRYDEHHQDLTLLKALVRQQLPEKYKEIFFDQSKNGYAGYIDGGASQEEFYKFIKPILEKMDGTEELLVKLNREDLLRKQRTFDNGSIPHQIHLGELHAILRRQEDFYPFLKDNREKIEKILTFRIPYYVGPLARGNSRFAWMTRKSEETITPWNFEEVVDKGASAQSFIERMTNFDKNLPNEKVLPKHSLLYEYFTVYNELTKVKYVTEGMRKPAFLSGEQKKAIVDLLFKTNRKVTVKQLKEDYFKKIECFDSVEISGVEDRFNASLGTYHDLLKIIKDKDFLDNEENEDILEDIVLTLTLFEDREMIEERLKTYAHLFDDKVMKQLKRRRYTGWGRLSRKLINGIRDKQSGKTILDFLKSDGFANRNFMQLIHDDSLTFKEDIQKAQVSGQGDSLHEHIANLAGSPAIKKGILQTVKVVDELVKVMGRHKPENIVIEMARENQTTQKGQKNSRERMKRIEEGIKELGSQILKEHPVENTQLQNEKLYLYYLQNGRDMYVDQELDINRLSDYDVDHIVPQSFLKDDSIDNKVLTRSDKNRGKSDNVPSEEVVKKMKNYWRQLLNAKLITQRKFDNLTKAERGGLSELDKAGFIKRQLVETRQITKHVAQILDSRMNTKYDENDKLIREVKVITLKSKLVSDFRKDFQFYKVREINNYHHAHDAYLNAVVGTALIKKYPKLESEFVYGDYKVYDVRKMIAKSEQEIGKATAKYFFYSNIMNFFKTEITLANGEIRKRPLIETNGETGEIVWDKGRDFATVRKVLSMPQVNIVKKTEVQTGGFSKESILPKRNSDKLIARKKDWDPKKYGGFDSPTVAYSVLVVAKVEKGKSKKLKSVKELLGITIMERSSFEKNPIDFLEAKGYKEVKKDLIIKLPKYSLFELENGRKRMLASAGELQKGNELALPSKYVNFLYLASHYEKLKGSPEDNEQKQLFVEQHKHYLDEIIEQISEFSKRVILADANLDKVLSAYNKHRDKPIREQAENIIHLFTLTNLGAPAAFKYFDTTIDRKRYTSTKEVLDATLIHQSITGLYETRIDLSQLGGD

SEQ ID NO: 708 - RNA, 54 nt, synthetic construct
  source 1..54: mol_type = other RNA
aagcgcaccgccgacggcagcgagttcgagagccccaagaagaagcgcaaggtg

SEQ ID NO: 709 - protein, 18 aa, synthetic construct
KRTADGSEFESPKKKRKV

SEQ ID NO: 710 - RNA, 119 nt, synthetic construct
  source 1..119: mol_type = other RNA
  modified_base 3: mod_base = OTHER; note = N1-methylpseudouridine
  modified_base 5: mod_base = OTHER; note = N1-methylpseudouridine
  modified_base 14: mod_base = OTHER; note = N1-methylpseudouridine
  modified_base 15: mod_base = OTHER; note = N1-methylpseudouridine
  modified_base 17: mod_base = OTHER; note = N1-methylpseudouridine
  modified_base 19: mod_base = OTHER; note = N1-methylpseudouridine
  modified_base 20: mod_base = OTHER; note = N1-methylpseudouridine
  modified_base 32: mod_base = OTHER; note = N1-methylpseudouridine
  modified_base 37: mod_base = OTHER; note = N1-methylpseudouridine
  modified_base 39: mod_base = OTHER; note = N1-methylpseudouridine
  modified_base 51: mod_base = OTHER; note = N1-methylpseudouridine
  modified_base 58: mod_base = OTHER; note = N1-methylpseudouridine
  modified_base 61: mod_base = OTHER; note = N1-methylpseudouridine
  modified_base 67: mod_base = OTHER; note = N1-methylpseudouridine
  modified_base 70: mod_base = OTHER; note = N1-methylpseudouridine
  modified_base 72: mod_base = OTHER; note = N1-methylpseudouridine
  modified_base 76: mod_base = OTHER; note = N1-methylpseudouridine
  modified_base 83: mod_base = OTHER; note = N1-methylpseudouridine
  modified_base 85: mod_base = OTHER; note = N1-methylpseudouridine
  modified_base 86: mod_base = OTHER; note = N1-methylpseudouridine
  modified_base 87: mod_base = OTHER; note = N1-methylpseudouridine
  modified_base 90: mod_base = OTHER; note = N1-methylpseudouridine
  modified_base 95: mod_base = OTHER; note = N1-methylpseudouridine
  modified_base 99: mod_base = OTHER; note = N1-methylpseudouridine
  modified_base 102: mod_base = OTHER; note = N1-methylpseudouridine
  modified_base 106: mod_base = OTHER; note = N1-methylpseudouridine
  modified_base 110: mod_base = OTHER; note = N1-methylpseudouridine
  modified_base 114: mod_base = OTHER; note = N1-methylpseudouridine
  modified_base 116: mod_base = OTHER; note = N1-methylpseudouridine
agtgtccagaccattgtcttccaaccccagctggcctctagaacacccactggccagtcctagagctcctgtccctacccactctttgctacaataaatgctgaatgaatccatctaga

SEQ ID NO: 711 - DNA, 56 bp, synthetic construct
  source 1..56: mol_type = other DNA
tcgtcggcagcgtcagatgtgtataagagacagaatgtgggaagatactttgaaga

SEQ ID NO: 712 - DNA, 53 bp, synthetic construct
  source 1..53: mol_type = other DNA
tcgtcggcagcgtcagatgtgtataagagacagcctggtctcctgttcacact

SEQ ID NO: 713 - DNA, 58 bp, synthetic construct
  source 1..58: mol_type = other DNA
tcgtcggcagcgtcagatgtgtataagagacaggggattcggatttttaaaagttgtc

SEQ ID NO: 714 - DNA, 54 bp, synthetic construct
  source 1..54: mol_type = other DNA
gtctcgtgggctcggagatgtgtataagagacagcgattactggcaatgtcccc

SEQ ID NO: 715 - DNA, 55 bp, synthetic construct
  source 1..55: mol_type = other DNA
gtctcgtgggctcggagatgtgtataagagacagagaaatggtttgctcagagga

SEQ ID NO: 716 - DNA, 54 bp, synthetic construct
  source 1..54: mol_type = other DNA
gtctcgtgggctcggagatgtgtataagagacagcccaatgcaatcccggaaaa

SEQ ID NO: 717 - DNA, 4767 bp, synthetic construct
  source 1..4767: mol_type = other DNA
atgagcgaggtggagttcagccacgagtactggatgcggcacgccctgaccctggccaagcgggcccgggacgagcgggaggtgcccgtgggcgccgtgctggtgctgaacaaccgggtgatcggcgagggctggaaccgggccatcggcctgcacgaccccaccgcccacgccgagatcatggccctgcggcagggcggcctggtgatgcagaactaccggctgatcgacgccaccctgtacgtgaccttcgagccctgcgtgatgtgcgccggcgccatgatccacagccggatcggccgggtggtgttcggcgtgcggaacgccaagaccggcgccgccggcagcctgatggacgtgctgcaccaccccggcatgaaccaccgggtggagatcaccgagggcatcctggccgacgagtgcgccgccctgctgtgccggttcttccggatgccccggcgggtgttcaacgcccagaagaaggcccagagcagcaccgacagcggcggcagcagcggcggcagcagcggcagcgagacacccggcaccagcgagagcgccacccccgagagcagcggcggcagcagcggcggcagcgacaagaagtacagcatcggcctggccatcggcaccaacagcgtgggctgggccgtgatcaccgacgagtacaaggtgcccagcaagaagttcaaggtgctgggcaacaccgaccggcacagcatcaagaagaacctgatcggcgccctgctgttcgacagcggcgagacagccgaggccacccggctgaagcggaccgcccggcggcggtacacccggcggaagaaccggatctgctacctgcaggagatcttcagcaacgagatggccaaggtggacgacagcttcttccaccggctggaggagagcttcctggtggaggaggacaagaagcacgagcggcaccccatcttcggcaacatcgtggacgaggtggcctaccacgagaagtaccccaccatctaccacctgcggaagaagctggtggacagcaccgacaaggccgacctgcggctgatctacctggccctggcccacatgatcaagttccggggccacttcctgatcgagggcgacctgaaccccgacaacagcgacgtggacaagctgttcatccagctggtgcagacctacaaccagctgttcgaggagaaccccatcaacgccagcggcgtggacgccaaggccatcctgagcgcccggctgagcaagagccggcggctggagaacctgatcgcccagctgcccggcgagaagaagaacggcctgttcggcaacctgatcgccctgagcctgggcctgacccccaacttcaagagcaacttcgacctggccgaggacgccaagctgcagctgagcaaggacacctacgacgacgacctggacaacctgctggcccagatcggcgaccagtacgccgacctgttcctggccgccaagaacctgagcgacgccatcctgctgagcgacatcctgcgggtgaacaccgagatcaccaaggcccccctgagcgccagcatgatcaagcggtacgacgagcaccaccaggacctgaccctgctgaaggccctggtgcggcagcagctgcccgagaagtacaaggagatcttcttcgaccagagcaagaacggctacgccggctacatcgacggcggcgccagccaggaggagttctacaagttcatcaagcccatcctggagaagatggacggcaccgaggagctgctggtgaagctgaaccgggaggacctgctgcggaagcagcggaccttcgacaacggcagcatcccccaccagatccacctgggcgagctgcacgccatcctgcggcggcaggaggacttctaccccttcctgaaggacaaccgggagaagatcgagaagatcctgaccttccggatcccctactacgtgggccccctggcccggggcaacagccggttcgcctggatgacccgcaagagcgaggagacaatcaccccctggaacttcgaggaggtggtggacaagggcgccagcgcccagagcttcatcgagcggatgaccaacttcgacaagaacctgcccaacgagaaggtgctgcccaagcacagcctgctgtacgagtacttcaccgtgtacaacgagctgaccaaggtgaagtacgtgaccgagggcatgcggaagcccgccttcctgagcggcgagcagaagaaggccatcgtggacctgctgttcaagaccaaccggaaggtgaccgtgaagcagctgaaggaggactacttcaagaagatcgagtgcttcgacagcgtggagatcagcggcgtggaggaccggttcaacgccagcctgggcacctaccacgacctgctgaagatcatcaaggacaaggacttcctggacaacgaggagaacgaggacatcctggaggacatcgtgctgaccctgaccctgttcgaggaccgggagatgatcgaggagcggctgaagacctacgcccacctgttcgacgacaaggtgatgaagcagctgaagcggcggcggtacaccggctggggccggctgagccggaagctgatcaacggcatccgggacaagcagagcggcaagaccatcctggacttcctcaagagcgacggcttcgccaaccggaacttcatgcagctgatccacgacgacagcctgaccttcaaggaggacatccagaaggcccaggtgagcggccagggcgacagcctgcacgagcacatcgccaacctggccggcagccccgccatcaagaagggcatcctgcagaccgtgaaggtggtggacgagctggtgaaggtgatgggccggcacaagcccgagaacatcgtgatcgagatggcccgggagaaccagaccacccagaagggccagaagaacagccgggagcggatgaagcggatcgaggagggcatcaaggagctgggcagccagatcctgaaggagcaccccgtggagaacacccagctgcagaacgagaagctgtacctgtactacctgcagaacggccgggacatgtacgtggaccaggagctggacatcaaccggctgagcgactacgacgtggaccacatcgtgccccagagcttcctgaaggacgacagcatcgacaacaaggtgctgacccggagcgacaagaaccggggcaagagcgacaacgtgcccagcgaggaggtggtgaagaagatgaagaactactggcggcagctgctgaacgccaagctgatcacccagcggaagttcgacaacctgaccaaggccgagcggggcggcctgagcgagctggacaaggccggcttcatcaagcggcagctggtggagacacggcagatcaccaagcacgtggcccagatcctggacagccggatgaacaccaagtacgacgagaacgacaagctgatccgggaggtgaaggtgatcaccctcaagagcaagctggtgagcgacttccggaaggacttccagttctacaaggtgcgggagatcaacaactaccaccacgcccacgacgcctacctgaacgccgtggtgggcaccgccctgatcaagaagtaccccaagctggagagcgagttcgtgtacggcgactacaaggtgtacgacgtgcggaagatgatcgccaagagcgagcaggagatcggcaaggccaccgccaagtacttcttctacagcaacatcatgaacttcttcaagaccgagatcaccctggccaacggcgagatccggaagcggcccctgatcgagacaaacggcgagacaggcgagatcgtgtgggacaagggccgggacttcgccaccgtgcggaaggtgctgagcatgccccaggtgaacatcgtgaagaagaccgaggtgcagaccggcggcttcagcaaggagagcatcctgcccaagcggaacagcgacaagctgatcgcccggaagaaggactgggaccccaagaagtacggcggcttcgagagccccaccgtggcctacagcgtgctggtggtggccaaggtggagaagggcaagagcaagaagctcaagagcgtgaaggagctgctgggcatcaccatcatggagcggagcagcttcgagaagaaccccatcgacttcctggaggccaagggctacaaggaggtgaagaaggacctgatcatcaagctgcccaagtacagcctgttcgagctggagaacggccggaagcggatgctggccagcgccggcgagctgcagaagggcaacgagctggccctgcccagcaagtacgtgaacttcctgtacctggccagccactacgagaagctgaagggcagccccgaggacaacgagcagaagcagctgttcgtggagcagcacaagcactacctggacgagatcatcgagcagatcagcgagttcagcaagcgggtgatcctggccgacgccaacctggacaaggtgctgagcgcctacaacaagcaccgggacaagcccatccgggagcaggccgagaacatcatccacctgttcaccctgaccaacctgggcgcccccgccgccttcaagtacttcgacaccaccatcgaccggaagcggtacaccagcaccaaggaggtgctggacgccaccctgatccaccagagcatcaccggcctgtacgagacacggatcgacctgagccagctgggcggcgacgagggcgccgacaagcggaccgccgacggcagcgagttcgagagccccaagaagaagcggaaggtgtga

SEQ ID NO: 718 - protein, 1588 aa, synthetic construct; identical to SEQ ID NO: 688

SEQ ID NO: 719 - DNA, 4767 bp, synthetic construct
  source 1..4767: mol_type = other DNA
atgagcgaggtggagttcagccacgagtactggatgcggcacgccctgaccctggccaagcgggcccgggacgagcgggaggtgcccgtgggcgccgtgctggtgctgaacaaccgggtgatcggcgagggctggaaccgggccatcggcctgcacgaccccaccgcccacgccgagatcatggccctgcggcagggcggcctggtgatgcagaactaccggctgatcgacgccaccctgtacgtgaccttcgagccctgcgtgatgtgcgccggcgccatgatccacagccggatcggccgggtggtgttcggcgtgcggaacgccaagaccggcgccgccggcagcctgatggacgtgctgcaccaccccggcatgaaccaccgggtggagatcaccgagggcatcctggccgacgagtgcgccgccctgctgtgccggttcttccggatgccccggcgggtgttcaacgcccagaagaaggcccagagcagcaccgacagcggcggcagcagcggcggcagcagcggcagcgagacacccggcaccagcgagagcgccacccccgagagcagcggcggcagcagcggcggcagcgacaagaagtacagcatcggcctggccatcggcaccaacagcgtgggctgggccgtgatcaccgacgagtacaaggtgcccagcaagaagttcaaggtgctgggcaacaccgaccggcacagcatcaagaagaacctgatcggcgccctgctgttcgacagcggcgagacagccgaggccacccggctgaagcggaccgcccggcggcggtacacccggcggaagaaccggatctgctacctgcaggagatcttcagcaacgagatggccaaggtggacgacagcttcttccaccggctggaggagagcttcctggtggaggaggacaagaagcacgagcggcaccccatcttcggcaacatcgtggacgaggtggcctaccacgagaagtaccccaccatctaccacctgcggaagaagctggtggacagcaccgacaaggccgacctgcggctgatctacctggccctggcccacatgatcaagttccggggccacttcctgatcgagggcgacctgaaccccgacaacagcgacgtggacaagctgttcatccagctggtgcagacctacaaccagctgttcgaggagaaccccatcaacgccagcggcgtggacgccaaggccatcctgagcgcccggctgagcaagagccggcggctggagaacctgatcgcccagctgcccggcgagaagaagaacggcctgttcggcaacctgatcgccctgagcctgggcctgacccccaacttcaagagcaacttcgacctggccgaggacgccaagctgcagctgagcaaggacacctacgacgacgacctggacaacctgctggcccagatcggcgaccagtacgccgacctgttcctggccgccaagaacctgagcgacgccatcctgctgagcgacatcctgcgggtgaacaccgagatcaccaaggcccccctgagcgccagcatgatcaagcggtacgacgagcaccaccaggacctgaccctgctgaaggccctggtgcggcagcagctgcccgagaagtacaaggagatcttcttcgaccagagcaagaacggctacgccggctacatcgacggcggcgccagccaggaggagttctacaagttcatcaagcccatcctggagaagatggacggcaccgaggagctgctggtgaagctgaaccgggaggacctgctgcggaagcagcggaccttcgacaacggcagcatcccccaccagatccacctgggcgagctgcacgccatcctgcggcggcaggaggacttctaccccttcctgaaggacaaccgggagaagatcgagaagatcctgaccttccggatcccctactacgtgggccccctggcccggggcaacagccggttcgcctggatgacccgcaagagcgaggagacaatcaccccctggaacttcgaggaggtggtggacaagggcgccagcgcccagagcttcatcgagcggatgaccaacttcgacaagaacctgcccaacgagaaggtgctgcccaagcacagcctgctgtacgagtacttcaccgtgtacaacgagctgaccaaggtgaagtacgtgaccgagggcatgcggaagcccgccttcctgagcggcgagcagaagaaggccatcgtggacctgctgttcaagaccaaccggaaggtgaccgtgaagcagctgaaggaggactacttcaagaagatcgagtgcttcgacagcgtggagatcagcggcgtggaggaccggttcaacgccagcctgggcacctaccacgacctgctgaagatcatcaaggacaaggacttcctggacaacgaggagaacgaggacatcctggaggacatcgtgctgaccctgaccctgttcgaggaccgggagatgatcgaggagcggctgaagacctacgcccacctgttcgacgacaaggtgatgaagcagctgaagcggcggcggtacaccggctggggccggctgagccggaagctgatcaacggcatccgggacaagcagagcggcaagaccatcctggacttcctcaagagcgacggcttcgccaacgccaacttcatgcagctgatccacgacgacagcctgaccttcaaggaggacatccagaaggcccaggtgagcggccagggcgacagcctgcacgagcacatcgccaacctggccggcagccccgccatcaagaagggcatcctgcagaccgtgaaggtggtggacgagctggtgaaggtgatgggccggcacaagcccgagaacatcgtgatcgagatggcccgggagaaccagaccacccagaagggccagaagaacagccgggagcggatgaagcggatcgaggagggcatcaaggagctgggcagccagatcctgaaggagcaccccgtggagaacacccagctgcagaacgagaagctgtacctgtactacctgcagaacggccgggacatgtacgtggaccaggagctggacatcaaccggctgagcgactacgacgtggaccacatcgtgccccagagcttcctgaaggacgacagcatcgacaacaaggtgctgacccggagcgacaagaaccggggcaagagcgacaacgtgcccagcgaggaggtggtgaagaagatgaagaactactggcggcagctgctgaacgccaagctgatcacccagcggaagttcgacaacctgaccaaggccgagcggggcggcctgagcgagctggacaaggccggcttcatcaagcggcagctggtggagacacggcagatcaccaagcacgtggcccagatcctggacagccggatgaacaccaagtacgacgagaacgacaagctgatccgggaggtgaaggtgatcaccctcaagagcaagctggtgagcgacttccggaaggacttccagttctacaaggtgcgggagatcaacaactaccaccacgcccacgacgcctacctgaacgccgtggtgggcaccgccctgatcaagaagtaccccaagctggagagcgagttcgtgtacggcgactacaaggtgtacgacgtgcggaagatgatcgccaagagcgagcaggagatcggcaaggccaccgccaagtacttcttctacagcaacatcatgaacttcttcaagaccgagatcaccctggccaacggcgagatccggaagcggcccctgatcgagacaaacggcgagacaggcgagatcgtgtgggacaagggccgggacttcgccaccgtgcggaaggtgctgagcatgccccaggtgaacatcgtgaagaagaccgaggtgcagaccggcggcttcagcaaggagagcatcctgcccaagcggaacagcgacaagctgatcgcccggaagaaggactgggaccccaagaagtacggcggcttcgagagccccaccgtggcctacagcgtgctggtggtggccaaggtggagaagggcaagagcaagaagctcaagagcgtgaaggagctgctgggcatcaccatcatggagcggagcagcttcgagaagaaccccatcgacttcctggaggccaagggctacaaggaggtgaagaaggacctgatcatcaagctgcccaagtacagcctgttcgagctggagaacggccggaagcggatgctggccagcgccggcgagctgcagaagggcaacgagctggccctgcccagcaagtacgtgaacttcctgtacctggccagccactacgagaagctgaagggcagccccgaggacaacgagcagaagcagctgttcgtggagcagcacaagcactacctggacgagatcatcgagcagatcagcgagttcagcaagcgggtgatcctggccgacgccaacctggacaaggtgctgagcgcctacaacaagcaccgggacaagcccatccgggagcaggccgagaacatcatccacctgttcaccctgaccaacctgggcgcccccgccgccttcaagtacttcgacaccaccatcgaccggaagcggtacaccagcaccaaggaggtgctggacgccaccctgatccaccagagcatcaccggcctgtacgagacacggatcgacctgagccagctgggcggcgacgagggcgccgacaagcggaccgccgacggcagcgagttcgagagccccaagaagaagcggaaggtgtga

SEQ ID NO: 720 - protein, 1588 aa, synthetic construct
MSEVEFSHEYWMRHALTLAKRARDEREVPVGAVLVLNNRVIGEGWNRAIGLHDPTAHAEIMALRQGGLVMQNYRLIDATLYVTFEPCVMCAGAMIHSRIGRVVFGVRNAKTGAAGSLMDVLHHPGMNHRVEITEGILADECAALLCRFFRMPRRVFNAQKKAQSSTDSGGSSGGSSGSETPGTSESATPESSGGSSGGSDKKYSIGLAIGTNSVGWAVITDEYKVPSKKFKVLGNTDRHSIKKNLIGALLFDSGETAEATRLKRTARRRYTRRKNRICYLQEIFSNEMAKVDDSFFHRLEESFLVEEDKKHERHPIFGNIVDEVAYHEKYPTIYHLRKKLVDSTDKADLRLIYLALAHMIKFRGHFLIEGDLNPDNSDVDKLFIQLVQTYNQLFEENPINASGVDAKAILSARLSKSRRLENLIAQLPGEKKNGLFGNLIALSLGLTPNFKSNFDLAEDAKLQLSKDTYDDDLDNLLAQIGDQYADLFLAAKNLSDAILLSDILRVNTEITKAPLSASMIKRYDEHHQDLTLLKALVRQQLPEKYKEIFFDQSKNGYAGYIDGGASQEEFYKFIKPILEKMDGTEELLVKLNREDLLRKQRTFDNGSIPHQIHLGELHAILRRQEDFYPFLKDNREKIEKILTFRIPYYVGPLARGNSRFAWMTRKSEETITPWNFEEVVDKGASAQSFIERMTNFDKNLPNEKVLPKHSLLYEYFTVYNELTKVKYVTEGMRKPAFLSGEQKKAIVDLLFKTNRKVTVKQLKEDYFKKIECFDSVEISGVEDRFNASLGTYHDLLKIIKDKDFLDNEENEDILEDIVLTLTLFEDREMIEERLKTYAHLFDDKVMKQLKRRRYTGWGRLSRKLINGIRDKQSGKTILDFLKSDGFANANFMQLIHDDSLTFKEDIQKAQVSGQGDSLHEHIANLAGSPAIKKGILQTVKVVDELVKVMGRHKPENIVIEMARENQTTQKGQKNSRERMKRIEEGIKELGSQILKEHPVENTQLQNEKLYLYYLQNGRDMYVDQELDINRLSDYDVDHIVPQSFLKDDSIDNKVLTRSDKNRGKSDNVPSEEVVKKMKNYWRQLLNAKLITQRKFDNLTKAERGGLSELDKAGFIKRQLVETRQITKHVAQILDSRMNTKYDENDKLIREVKVITLKSKLVSDFRKDFQFYKVREINNYHHAHDAYLNAVVGTALIKKYPKLESEFVYGDYKVYDVRKMIAKSEQEIGKATAKYFFYSNIMNFFKTEITLANGEIRKRPLIETNGETGEIVWDKGRDFATVRKVLSMPQVNIVKKTEVQTGGFSKESILPKRNSDKLIARKKDWDPKKYGGFESPTVAYSVLVVAKVEKGKSKKLKSVKELLGITIMERSSFEKNPIDFLEAKGYKEVKKDLIIKLPKYSLFELENGRKRMLASAGELQKGNELALPSKYVNFLYLASHYEKLKGSPEDNEQKQLFVEQHKHYLDEIIEQISEFSKRVILADANLDKVLSAYNKHRDKPIREQAENIIHLFTLTNLGAPAAFKYFDTTIDRKRYTSTKEVLDATLIHQSITGLYETRIDLSQLGGDEGADKRTADGSEFESPKKKRKV

SEQ ID NO: 721 - DNA, 4767 bp, synthetic construct
  source 1..4767: mol_type = other DNA
atgagcgaggtggagttcagccacgagtactggatgcggcacgccctgaccctggccaagcgggcccgggacgagcgggaggtgcccgtgggcgccgtgctggtgctgaacaaccgggtgatcggcgagggctggaaccgggccatcggcctgcacgaccccaccgcccacgccgagatcatggccctgcggcagggcggcctggtgatgcagaactaccggctgatcgacgccaccctgtacgtgaccttcgagccctgcgtgatgtgcgccggcgccatgatccacagccggatcggccgggtggtgttcggcgtgcggaacgccaagaccggcgccgccggcagcctgatggacgtgctgcaccaccccggcatgaaccaccgggtggagatcaccgagggcatcctggccgacgagtgcgccgccctgctgtgccggttcttccggatgccccggcgggtgttcaacgcccagaagaaggcccagagcagcaccgacagcggcggcagcagcggcggcagcagcggcagcgagacacccggcaccagcgagagcgccacccccgagagcagcggcggcagcagcggcggcagcgacaagaagtacagcatcggcctggccatcggcaccaacagcgtgggctgggccgtgatcaccgacgagtacaaggtgcccagcaagaagttcaaggtgctgggcaacaccgaccggcacagcatcaagaagaacctgatcggcgccctgctgttcgacagcggcgagacagccgaggccacccggctgaagcggaccgcccggcggcggtacacccggcggaagaaccggatctgctacctgcaggagatcttcagcaacgagatggccaaggtggacgacagcttcttccaccggctggaggagagcttcctggtggaggaggacaagaagcacgagcggcaccccatcttcggcaacatcgtggacgaggtggcctaccacgagaagtaccccaccatctaccacctgcggaagaagctggtggacagcaccgacaaggccgacctgcggctgatctacctggccctggcccacatgatcaagttccggggccacttcctgatcgagggcgacctgaaccccgacaacagcgacgtggacaagctgttcatccagctggtgcagacctacaaccagctgttcgaggagaaccccatcaacgccagcggcgtggacgccaaggccatcctgagcgcccggctgagcaagagccggcggctggagaacctgatcgcccagctgcccggcgagaagaagaacggcctgttcggcaacctgatcgccctgagcctgggcctgacccccaacttcaagagcaacttcgacctggccgaggacgccaagctgcagctgagcaaggacacctacgacgacgacctggacaacctgctggcccagatcggcgaccagtacgccgacctgttcctggccgccaagaacctgagcgacgccatcctgctgagcgacatcctgcgggtgaacaccgagatcaccaaggcccccctgagcgccagcatgatcaagcggtacgacgagcaccaccaggacctgaccctgctgaaggccctggtgcggcagcagctgcccgagaagtacaaggagatcttcttcgaccagagcaagaacggctacgccggctacatcgacggcggcgccagccaggaggagttctacaagttcatcaagcccatcctggagaagatggacggcaccgaggagctgctggtgaagctgaaccgggaggacctgctgcggaagcagcggaccttcgacaacggcagcatcccccaccagatccacctgggcgagctgcacgccatcctgcggcggcaggaggacttctaccccttcctgaaggacaaccgggagaagatcgagaagatcctgaccttccggatcccctactacgtgggccccctggcccggggcaacagccggttcgcctggatgacccgcaagagcgaggagacaatcaccccctggaacttcgaggaggtggtggacaagggcgccagcgcccagagcttcatcgagcggatgaccaacttcgacaagaacctgcccaacgagaaggtgctgcccaagcacagcctgctgtacgagtacttcaccgtgtacaacgagctgaccaaggtgaagtacgtgaccgagggcatgcggaagcccgccttcctgagcggcgagcagaagaaggccatcgtggacctgctgttcaagaccaaccggaaggtgaccgtgaagcagctgaaggaggactacttcaagaagatcgagtgcttcgacagcgtggagatcagcggcgtggaggaccggttcaacgccagcctgggcacctaccacgacctgctgaagatcatcaaggacaaggacttcctggacaacgaggagaacgaggacatcctggaggacatcgtgctgaccctgaccctgttcgaggaccgggagatgatcgaggagcggctgaagacctacgcccacctgttcgacgacaaggtgatgaagcagctgaagcggcggcggtacaccggctggggccggctgagccggaagctgatcaacggcatccgggacaagcagagcggcaagaccatcctggacttcctcaagagcgacggcttcgccaacgccaacttcatgcagctgatccacgacgacagcctgaccttcaaggaggacatccagaaggcccaggtgagcggccagggcgacagcctgcacgagcacatcgccaacctggccggcagccccgccatcaagaagggcatcctgcagaccgtgaaggtggtggacgagctggtgaaggtgatgggccggcacaagcccgagaacatcgtgatcgagatggcccgggagaaccagaccacccagaagggccagaagaacagccgggagcggatgaagcggatcgaggagggcatcaaggagctgggcagccagatcctgaaggagcaccccgtggagaacacccagctgcagaacgagaagctgtacctgtactacctgcagaacggccgggacatgtacgtggaccaggagctggacatcaaccggctgagcgactacgacgtggaccacatcgtgccccagagcttcctgaaggacgacagcatcgacaacaaggtgctgacccggagcgacaagaaccggggcaagagcgacaacgtgcccagcgaggaggtggtgaagaagatgaagaactactggcggcagctgctgaacgccaagctgatcacccagcggaagttcgacaacctgaccaaggccgagcggggcggcctgagcgagctggacaaggccggcttcatcaagcggcagctggtggagacacggcagatcaccaagcacgtggcccagatcctggacagccggatgaacaccaagtacgacgagaacgacaagctgatccgggaggtgaaggtgatcaccctcaagagcaagctggtgagcgacttccggaaggacttccagttctacaaggtgcgggagatcaacaactaccaccacgcccacgacgcctacctgaacgccgtggtgggcaccgccctgatcaagaagtaccccaagctggagagcgagttcgtgtacggcgactacaaggtgtacgacgtgcggaagatgatcgccaagagcgagcaggagatcggcaaggccaccgccaagtacttcttctacagcaacatcatgaacttcttcaagaccgagatcaccctggccaacggcgagatccggaagcggcccctgatcgagacaaacggcgagacaggcgagatcgtgtgggacaagggccgggacttcgccaccgtgcggaaggtgctgagcatgccccaggtgaacatcgtgaagaagaccgaggtgcagaccggcggcttcagcaaggagagcatcctgcccaagcggaacagcgacaagctgatcgcccggaagaaggactgggaccccaagaagtacggcggcttcgacagccccaccgtggcctacagcgtgctggtggtggccaaggtggagaagggcaagagcaagaagctcaagagcgtgaaggagctgctgggcatcaccatcatggagcggagcagcttcgagaagaaccccatcgacttcctggaggccaagggctacaaggaggtgaagaaggacctgatcatcaagctgcccaagtacagcctgttcgagctggagaacggccggaagcggatgctggccagcgccggcgagctgcagaagggcaacgagctggccctgcccagcaagtacgtgaacttcctgtacctggccagccactacgagaagctgaagggcagccccgaggacaacgagcagaagcagctgttcgtggagcagcacaagcactacctggacgagatcatcgagcagatcagcgagttcagcaagcgggtgatcctggccgacgccaacctggacaaggtgctgagcgcctacaacaagcaccgggacaagcccatccgggagcaggccgagaacatcatccacctgttcaccctgaccaacctgggcgcccccgccgccttcaagtacttcgacaccaccatcgaccggaagcggtacaccagcaccaaggaggtgctggacgccaccctgatccaccagagcatcaccggcctgtacgagacacggatcgacctgagccagctgggcggcgacgagggcgccgacaagcggaccgccgacggcagcgagttcgagagccccaagaagaagcggaaggtgtga

SEQ ID NO: 722 - protein, 1588 aa, synthetic construct
MSEVEFSHEYWMRHALTLAKRARDEREVPVGAVLVLNNRVIGEGWNRAIGLHDPTAHAEIMALRQGGLVMQNYRLIDATLYVTFEPCVMCAGAMIHSRIGRVVFGVRNAKTGAAGSLMDVLHHPGMNHRVEITEGILADECAALLCRFFRMPRRVFNAQKKAQSSTDSGGSSGGSSGSETPGTSESATPESSGGSSGGSDKKYSIGLAIGTNSVGWAVITDEYKVPSKKFKVLGNTDRHSIKKNLIGALLFDSGETAEATRLKRTARRRYTRRKNRICYLQEIFSNEMAKVDDSFFHRLEESFLVEEDKKHERHPIFGNIVDEVAYHEKYPTIYHLRKKLVDSTDKADLRLIYLALAHMIKFRGHFLIEGDLNPDNSDVDKLFIQLVQTYNQLFEENPINASGVDAKAILSARLSKSRRLENLIAQLPGEKKNGLFGNLIALSLGLTPNFKSNFDLAEDAKLQLSKDTYDDDLDNLLAQIGDQYADLFLAAKNLSDAILLSDILRVNTEITKAPLSASMIKRYDEHHQDLTLLKALVRQQLPEKYKEIFFDQSKNGYAGYIDGGASQEEFYKFIKPILEKMDGTEELLVKLNREDLLRKQRTFDNGSIPHQIHLGELHAILRRQEDFYPFLKDNREKIEKILTFRIPYYVGPLARGNSRFAWMTRKSEETITPWNFEEVVDKGASAQSFIERMTNFDKNLPNEKVLPKHSLLYEYFTVYNELTKVKYVTEGMRKPAFLSGEQKKAIVDLLFKTNRKVTVKQLKEDYFKKIECFDSVEISGVEDRFNASLGTYHDLLKIIKDKDFLDNEENEDILEDIVLTLTLFEDREMIEERLKTYAHLFDDKVMKQLKRRRYTGWGRLSRKLINGIRDKQSGKTILDFLKSDGFANANFMQLIHDDSLTFKEDIQKAQVSGQGDSLHEHIANLAGSPAIKKGILQTVKVVDELVKVMGRHKPENIVIEMARENQTTQKGQKNSRERMKRIEEGIKELGSQILKEHPVENTQLQNEKLYLYYLQNGRDMYVDQELDINRLSDYDVDHIVPQSFLKDDSIDNKVLTRSDKNRGKSDNVPSEEVVKKMKNYWRQLLNAKLITQRKFDNLTKAERGGLSELDKAGFIKRQLVETRQITKHVAQILDSRMNTKYDENDKLIREVKVITLKSKLVSDFRKDFQFYKVREINNYHHAHDAYLNAVVGTALIKKYPKLESEFVYGDYKVYDVRKMIAKSEQEIGKATAKYFFYSNIMNFFKTEITLANGEIRKRPLIETNGETGEIVWDKGRDFATVRKVLSMPQVNIVKKTEVQTGGFSKESILPKRNSDKLIARKKDWDPKKYGGFDSPTVAYSVLVVAKVEKGKSKKLKSVKELLGITIMERSSFEKNPIDFLEAKGYKEVKKDLIIKLPKYSLFELENGRKRMLASAGELQKGNELALPSKYVNFLYLASHYEKLKGSPEDNEQKQLFVEQHKHYLDEIIEQISEFSKRVILADANLDKVLSAYNKHRDKPIREQAENIIHLFTLTNLGAPAAFKYFDTTIDRKRYTSTKEVLDATLIHQSITGLYETRIDLSQLGGDEGADKRTADGSEFESPKKKRKV

SEQ ID NO: 723 - RNA, 4767 nt, synthetic construct
  source 1..4767: mol_type = other RNA
  modified_base 2: mod_base = OTHER; note = N1-methylpseudouridine
  modified_base 11: mod_base = OTHER; note = N1-methylpseudouridine
  modified_base 16: mod_base = OTHER; note = N1-methylpseudouridine
  modified_base 17: mod_base = OTHER; note = N1-methylpseudouridine
  modified_base 28: mod_base = OTHER; note = N1-methylpseudouridine
  modified_base 31: mod_base = OTHER; note = N1-methylpseudouridine
  modified_base 35: mod_base = OTHER; note = N1-methylpseudouridine
  modified_base 47: mod_base = OTHER; note = N1-methylpseudouridine
  modified_base 53: mod_base = OTHER; note = N1-methylpseudouridine
  modified_base 83: mod_base = OTHER; note = N1-methylpseudouridine
  modified_base 89: mod_base = OTHER; note = N1-methylpseudouridine
  modified_base 98: mod_base = OTHER; note = N1-methylpseudouridine
  modified_base 101: mod_base = OTHER; note = N1-methylpseudouridine
  modified_base 104: mod_base = OTHER; note = N1-methylpseudouridine
  modified_base 107: mod_base = OTHER; note = N1-methylpseudouridine
  modified_base 119: mod_base = OTHER; note = N1-methylpseudouridine
  modified_base 122: mod_base = OTHER; note = N1-methylpseudouridine
  modified_base 133: mod_base = OTHER; note = N1-methylpseudouridine
  modified_base 146: mod_base = OTHER; note = N1-methylpseudouridine
  modified_base 152: mod_base = OTHER; note = N1-methylpseudouridine
  modified_base 179: mod_base = OTHER; note = N1-methylpseudouridine
  modified_base 182: mod_base = OTHER; note = N1-methylpseudouridine
  modified_base 188: mod_base = OTHER; note = N1-methylpseudouridine
  modified_base 203: mod_base = OTHER; note = N1-methylpseudouridine
  modified_base 206: mod_base = OTHER; note = N1-methylpseudouridine
  modified_base 209: mod_base = OTHER; note = N1-methylpseudouridine
  modified_base 217: mod_base = OTHER; note = N1-methylpseudouridine
  modified_base 224: mod_base = OTHER; note = N1-methylpseudouridine
  modified_base 227: mod_base = OTHER; note = N1-methylpseudouridine
  modified_base 239: mod_base = OTHER; note = N1-methylpseudouridine
  modified_base 241: mod_base = OTHER; note = N1-methylpseudouridine
  modified_base 245: mod_base = OTHER; note = N1-methylpseudouridine
  modified_base 250: mod_base = OTHER; note = N1-methylpseudouridine
  modified_base 251: mod_base = OTHER; note = N1-methylpseudouridine
  modified_base 259: mod_base = OTHER; note = N1-methylpseudouridine
  modified_base 263: mod_base = OTHER; note = N1-methylpseudouridine
  modified_base 266: mod_base = OTHER; note = N1-methylpseudouridine
  modified_base 268: mod_base = OTHER; note = N1-methylpseudouridine
  modified_base 281: mod_base = OTHER; note = N1-methylpseudouridine
  modified_base 284: mod_base = OTHER; note = N1-methylpseudouridine
  modified_base 296: mod_base = OTHER; note = N1-methylpseudouridine
  modified_base 305: mod_base = OTHER; note = N1-methylpseudouridine
  modified_base 308: mod_base = OTHER; note = N1-methylpseudouridine
  modified_base 310: mod_base = OTHER; note = N1-methylpseudouridine
  modified_base 311: mod_base = OTHER; note = N1-methylpseudouridine
  modified_base 317: mod_base = OTHER; note = N1-methylpseudouridine
  modified_base 350: mod_base = OTHER; note = N1-methylpseudouridine
  modified_base 353: mod_base = OTHER; note = N1-methylpseudouridine
  modified_base 359: mod_base = OTHER; note = N1-methylpseudouridine
  modified_base 362: mod_base = OTHER; note = N1-methylpseudouridine
  modified_base 377: mod_base = OTHER; note = N1-methylpseudouridine
  modified_base 389: mod_base = OTHER; note = N1-methylpseudouridine
  modified_base 395: mod_base = OTHER; note = N1-methylpseudouridine
  modified_base 407: mod_base = OTHER; note = N1-methylpseudouridine
  modified_base 410: mod_base = OTHER; note = N1-methylpseudouridine
  modified_base 421: mod_base = OTHER; note = N1-methylpseudouridine
  modified_base 431: mod_base = OTHER; note = N1-methylpseudouridine
  modified_base 434: mod_base = OTHER; note = N1-methylpseudouridine
  modified_base 436: mod_base = OTHER; note = N1-methylpseudouridine
  modified_base 442: mod_base = OTHER; note = N1-methylpseudouridine
  modified_base 443: mod_base = OTHER; note = N1-methylpseudouridine
  modified_base 445: mod_base = OTHER; note = N1-methylpseudouridine
  modified_base 446: mod_base = OTHER; note = N1-methylpseudouridine
  modified_base 452: mod_base = OTHER; note = N1-methylpseudouridine
  modified_base 464: mod_base = OTHER; note = N1-methylpseudouridine
  modified_base 466: mod_base = OTHER; note = N1-methylpseudouridine
  modified_base 467: mod_base = OTHER; note = N1-methylpseudouridine
  modified_base 607: mod_base = OTHER; note = N1-methylpseudouridine
  modified_base 614: mod_base = OTHER; note = N1-methylpseudouridine
  modified_base 620: mod_base = OTHER; note = N1-methylpseudouridine
  modified_base 626: mod_base = OTHER; note = N1-methylpseudouridine
  modified_base 641: mod_base = OTHER; note = N1-methylpseudouridine
  modified_base 646: mod_base = OTHER; note = N1-methylpseudouridine
  modified_base 653: mod_base = OTHER; note = N1-methylpseudouridine
  modified_base 656: mod_base = OTHER; note = N1-methylpseudouridine
  modified_base 667: mod_base = OTHER; note = N1-methylpseudouridine
  modified_base 674: mod_base = OTHER; note = N1-methylpseudouridine
  modified_base 688: mod_base = OTHER; note = N1-methylpseudouridine
  modified_base 689: mod_base = OTHER; note = N1-methylpseudouridine
  modified_base 695: mod_base = OTHER; note = N1-methylpseudouridine
  modified_base 698: mod_base = OTHER; note = N1-methylpseudouridine
  modified_base 722: mod_base = OTHER; note = N1-methylpseudouridine
  modified_base 734: mod_base = OTHER; note = N1-methylpseudouridine
  modified_base 737: mod_base = OTHER; note = N1-methylpseudouridine
  modified_base 746: mod_base = OTHER; note = N1-methylpseudouridine
  modified_base 749: mod_base = OTHER; note = N1-methylpseudouridine
  modified_base 751: mod_base = OTHER; note = N1-methylpseudouridine
  modified_base 752: mod_base = OTHER; note = N1-methylpseudouridine
  modified_base 785: mod_base = OTHER; note = N1-methylpseudouridine
  modified_base 808: mod_base = OTHER; note = N1-methylpseudouridine
  modified_base 830: mod_base = OTHER; note = N1-methylpseudouridine
  modified_base 832: mod_base = OTHER; note = N1-methylpseudouridine
  modified_base 835: mod_base = OTHER; note = N1-methylpseudouridine
  modified_base 839: mod_base = OTHER; note = N1-methylpseudouridine
  modified_base 848: mod_base = OTHER; note = N1-methylpseudouridine
  modified_base 850: mod_base = OTHER; note = N1-methylpseudouridine
  modified_base 851: mod_base = OTHER; note = N1-methylpseudouridine
  modified_base 863: mod_base = OTHER; note = N1-methylpseudouridine
  modified_base 872: mod_base = OTHER; note = N1-methylpseudouridine
  modified_base 883: mod_base = OTHER; note = N1-methylpseudouridine
  modified_base 884: mod_base = OTHER; note = N1-methylpseudouridine
  modified_base 886: mod_base = OTHER; note = N1-methylpseudouridine
  modified_base 887: mod_base = OTHER; note = N1-methylpseudouridine
  modified_base 896: mod_base = OTHER; note = N1-methylpseudouridine
  modified_base 907: mod_base = OTHER; note = N1-methylpseudouridine
  modified_base 908: mod_base = OTHER; note = N1-methylpseudouridine
  modified_base 911: mod_base = OTHER; note = N1-methylpseudouridine
  modified_base 914: mod_base = OTHER; note = N1-methylpseudouridine
  modified_base 947: mod_base = OTHER; note = N1-methylpseudouridine
  modified_base 949: mod_base = OTHER; note = N1-methylpseudouridine
  modified_base 950: mod_base = OTHER; note = N1-methylpseudouridine
  modified_base 959: mod_base = OTHER; note = N1-methylpseudouridine
  modified_base 962: mod_base = OTHER; note = N1-methylpseudouridine
  modified_base 971: mod_base = OTHER; note = N1-methylpseudouridine
  modified_base 976: mod_base = OTHER; note = N1-methylpseudouridine
  modified_base 988: mod_base = OTHER; note = N1-methylpseudouridine
  modified_base 998: mod_base = OTHER; note = N1-methylpseudouridine
  modified_base 1000: mod_base = OTHER; note = N1-methylpseudouridine
  modified_base 1007: mod_base = OTHER; note = N1-methylpseudouridine
  modified_base 1019: mod_base = OTHER; note = N1-methylpseudouridine
  modified_base 1022: mod_base = OTHER; note = N1-methylpseudouridine
  modified_base 1046: mod_base = OTHER; note = N1-methylpseudouridine
  modified_base 1052: mod_base = OTHER; note = N1-methylpseudouridine
  modified_base 1055: mod_base = OTHER; note = N1-methylpseudouridine
  modified_base 1057: mod_base = OTHER; note = N1-methylpseudouridine
  modified_base 1061: mod_base = OTHER; note = N1-methylpseudouridine
  modified_base 1067: mod_base = OTHER; note = N1-methylpseudouridine
  modified_base 1076: mod_base = OTHER; note = N1-methylpseudouridine
  modified_base 1079: mod_base = OTHER; note = N1-methylpseudouridine
  modified_base 1084: mod_base = OTHER; note = N1-methylpseudouridine
  modified_base 1085: mod_base = OTHER; note = N1-methylpseudouridine
  modified_base 1096: mod_base = OTHER; note = N1-methylpseudouridine
  modified_base 1097: mod_base = OTHER; note = N1-methylpseudouridine
  modified_base 1100: mod_base = OTHER; note = N1-methylpseudouridine
  modified_base 1103: mod_base = OTHER; note = N1-methylpseudouridine
  modified_base 1115: mod_base = OTHER; note = N1-methylpseudouridine
  modified_base 1136: mod_base = OTHER; note = N1-methylpseudouridine
  modified_base 1145: mod_base = OTHER; note = N1-methylpseudouridine
  modified_base 1147: mod_base = OTHER; note = N1-methylpseudouridine
  modified_base 1148: mod_base = OTHER; note = N1-methylpseudouridine
  modified_base 1151: mod_base = OTHER; note = N1-methylpseudouridine
  modified_base 1157: mod_base = OTHER; note = N1-methylpseudouridine
  modified_base 1160: mod_base = OTHER; note = N1-methylpseudouridine
  modified_base 1168: mod_base = OTHER; note = N1-methylpseudouridine
  modified_base 1178: mod_base = OTHER; note = N1-methylpseudouridine
  modified_base 1180: mod_base = OTHER; note = N1-methylpseudouridine
  modified_base 1181: mod_base = OTHER; note = N1-methylpseudouridine
  modified_base 1196: mod_base = OTHER; note = N1-methylpseudouridine
  modified_base 1211: mod_base = OTHER; note = N1-methylpseudouridine
  modified_base 1226: mod_base = OTHER; note = N1-methylpseudouridine
  modified_base 1229: mod_base = OTHER; note = N1-methylpseudouridine
  modified_base 1241: mod_base = OTHER; note = N1-methylpseudouridine
  modified_base 1259: mod_base = OTHER; note = N1-methylpseudouridine
  modified_base 1268: mod_base = OTHER; note = N1-methylpseudouridine
  modified_base 1271: mod_base = OTHER; note = N1-methylpseudouridine
  modified_base 1280: mod_base = OTHER; note = N1-methylpseudouridine
  modified_base 1304: mod_base = OTHER; note = N1-methylpseudouridine
  modified_base 1306: mod_base = OTHER; note = N1-methylpseudouridine
  modified_base 1307: mod_base = OTHER; note = N1-methylpseudouridine
  modified_base 1316: mod_base = OTHER; note = N1-methylpseudouridine
  modified_base 1319: mod_base = OTHER; note = N1-methylpseudouridine
  modified_base 1325: mod_base = OTHER; note = N1-methylpseudouridine
  modified_base 1331: mod_base = OTHER; note = N1-methylpseudouridine
  modified_base 1337: mod_base = OTHER; note = N1-methylpseudouridine
  modified_base 1348: mod_base = OTHER; note = N1-methylpseudouridine
  modified_base 1349: mod_base = OTHER; note = N1-methylpseudouridine
  modified_base 1360: mod_base = OTHER; note = N1-methylpseudouridine
  modified_base 1361: mod_base = OTHER; note = N1-methylpseudouridine
  modified_base 1367: mod_base = OTHER; note = N1-methylpseudouridine
  modified_base 1385: mod_base = OTHER; note = N1-methylpseudouridine
  modified_base 1391: mod_base = OTHER; note = N1-methylpseudouridine
  modified_base 1405: mod_base = OTHER; note = N1-methylpseudouridine
  modified_base 1418: mod_base = OTHER; note = N1-methylpseudouridine
  modified_base 1427: mod_base = OTHER; note = N1-methylpseudouridine
  modified_base 1430: mod_base = OTHER; note = N1-methylpseudouridine
  modified_base 1439: mod_base = OTHER; note = N1-methylpseudouridine
  modified_base 1450: mod_base = OTHER; note = N1-methylpseudouridine
  modified_base 1460: mod_base = OTHER; note = N1-methylpseudouridine
  modified_base 1462: mod_base = OTHER; note = N1-methylpseudouridine
  modified_base 1463: mod_base = OTHER; note = N1-methylpseudouridine
  modified_base 1466: mod_base = OTHER; note = N1-methylpseudouridine
  modified_base 1481: mod_base = OTHER; note = N1-methylpseudouridine
  modified_base 1493: mod_base = OTHER; note = N1-methylpseudouridine
  modified_base 1496: mod_base = OTHER; note = N1-methylpseudouridine
  modified_base 1499: mod_base = OTHER; note = N1-methylpseudouridine
  modified_base 1508: mod_base = OTHER; note = N1-methylpseudouridine
  modified_base 1511: mod_base = OTHER; note = N1-methylpseudouridine
  modified_base 1517: mod_base = OTHER; note = N1-methylpseudouridine
  modified_base 1529: mod_base = OTHER; note = N1-methylpseudouridine
  modified_base 1544: mod_base = OTHER; note = N1-methylpseudouridine
  modified_base 1556: mod_base = OTHER; note = N1-methylpseudouridine
  modified_base 1559: mod_base = OTHER; note = N1-methylpseudouridine
  modified_base 1567: mod_base = OTHER; note = N1-methylpseudouridine
  modified_base 1589: mod_base = OTHER; note = N1-methylpseudouridine
  modified_base 1595: mod_base = OTHER; note = N1-methylpseudouridine
  modified_base 1598: mod_base = OTHER; note = N1-methylpseudouridine
  modified_base 1607: mod_base = OTHER; note = N1-methylpseudouridine
  modified_base 1610: mod_base = OTHER; note = N1-methylpseudouridine
  modified_base 1622: mod_base = OTHER; note = N1-methylpseudouridine
  modified_base 1633: mod_base = OTHER; note = N1-methylpseudouridine
  modified_base 1643: mod_base = OTHER; note = N1-methylpseudouridine
  modified_base 1645: mod_base = OTHER; note = N1-methylpseudouridine
  modified_base 1646: mod_base = OTHER; note = N1-methylpseudouridine
  modified_base 1648: mod_base = OTHER; note = N1-methylpseudouridine
  modified_base 1649: mod_base = OTHER; note = N1-methylpseudouridine
  modified_base 1669: mod_base = OTHER; note = N1-methylpseudouridine
  modified_base 1678: mod_base = OTHER; note = N1-methylpseudouridine
  modified_base 1682: mod_base = OTHER; note = N1-methylpseudouridine
  modified_base 1708: mod_base = OTHER; note = N1-methylpseudouridine
  modified_base 1709: mod_base = OTHER; note = N1-methylpseudouridine
  modified_base 1711: mod_base = OTHER; note = N1-methylpseudouridine
  modified_base 1717: mod_base = OTHER; note = N1-methylpseudouridine
  modified_base 1718: mod_base = OTHER; note = N1-methylpseudouridine
  modified_base 1721: mod_base = OTHER; note = N1-methylpseudouridine
  modified_base 1730: mod_base = OTHER; note = N1-methylpseudouridine
  modified_base 1733: mod_base = OTHER; note = N1-methylpseudouridine
  modified_base 1742: mod_base = OTHER; note = N1-methylpseudouridine
  modified_base 1760: mod_base = OTHER; note = N1-methylpseudouridine
  modified_base 1763: mod_base = OTHER; note = N1-methylpseudouridine
  modified_base 1766: mod_base = OTHER; note = N1-methylpseudouridine
  modified_base 1772: mod_base = OTHER; note = N1-methylpseudouridine
  modified_base 1787: mod_base = OTHER; note = N1-methylpseudouridine
  modified_base 1790: mod_base = OTHER; note = N1-methylpseudouridine
  modified_base 1807: mod_base = OTHER; note = N1-methylpseudouridine
  modified_base 1808: mod_base = OTHER; note = N1-methylpseudouridine
  modified_base 1823: mod_base = OTHER; note = N1-methylpseudouridine
  modified_base 1835: mod_base = OTHER; note = N1-methylpseudouridine
  modified_base 1841: mod_base = OTHER; note = N1-methylpseudouridine
  modified_base 1850: mod_base = OTHER; note = N1-methylpseudouridine
  modified_base 1859: mod_base = OTHER; note = N1-methylpseudouridine
  modified_base 1862: mod_base = OTHER; note = N1-methylpseudouridine
  modified_base 1879: mod_base = OTHER; note = N1-methylpseudouridine
  modified_base 1880: mod_base = OTHER; note = N1-methylpseudouridine
  modified_base 1882: mod_base = OTHER; note = N1-methylpseudouridine
  modified_base 1888: mod_base = OTHER; note = N1-methylpseudouridine
  modified_base 1889: mod_base = OTHER; note = N1-methylpseudouridine
  modified_base 1892: mod_base = OTHER; note = N1-methylpseudouridine
  modified_base 1913: mod_base = OTHER; note = N1-methylpseudouridine
  modified_base 1922: mod_base = OTHER; note = N1-methylpseudouridine
  modified_base 1925: mod_base = OTHER; note = N1-methylpseudouridine
  modified_base 1930: mod_base = OTHER; note = N1-methylpseudouridine
  modified_base 1931: mod_base = OTHER; note = N1-methylpseudouridine
  modified_base 1937: mod_base = OTHER; note = N1-methylpseudouridine
  modified_base 1942: mod_base = OTHER; note = N1-methylpseudouridine
  modified_base 1945: mod_base = OTHER; note = N1-methylpseudouridine
  modified_base 1949: mod_base = OTHER; note = N1-methylpseudouridine
  modified_base 1958: mod_base = OTHER; note = N1-methylpseudouridine
  modified_base 1978: mod_base = OTHER; note = N1-methylpseudouridine
  modified_base 1979: mod_base = OTHER; note = N1-methylpseudouridine
  modified_base 1984: mod_base = OTHER; note = N1-methylpseudouridine
  modified_base 1988: mod_base = OTHER; note = N1-methylpseudouridine
  modified_base 2012: mod_base = OTHER; note = N1-methylpseudouridine
  modified_base 2020: mod_base = OTHER; note = N1-methylpseudouridine
  modified_base 2026: mod_base = OTHER; note = N1-methylpseudouridine
  modified_base 2027: mod_base = OTHER; note = N1-methylpseudouridine
  modified_base 2036: mod_base = OTHER; note = N1-methylpseudouridine
  modified_base 2039: mod_base = OTHER; note = N1-methylpseudouridine
  modified_base 2065: mod_base = OTHER; note = N1-methylpseudouridine
  modified_base 2066: mod_base = OTHER; note = N1-methylpseudouridine
  modified_base 2069: mod_base = OTHER; note = N1-methylpseudouridine
  modified_base 2078: mod_base = OTHER; note = N1-methylpseudouridine
  modified_base 2086: mod_base = OTHER; note = N1-methylpseudouridine
  modified_base 2087: mod_base = OTHER; note = N1-methylpseudouridine
  modified_base 2099: mod_base = OTHER; note = N1-methylpseudouridine
  modified_base 2114: mod_base = OTHER; note = N1-methylpseudouridine
  modified_base 2117: mod_base = OTHER; note = N1-methylpseudouridine
  modified_base 2132: mod_base = OTHER; note = N1-methylpseudouridine
  modified_base 2135: mod_base = OTHER; note = N1-methylpseudouridine
  modified_base 2137: mod_base = OTHER; note = N1-methylpseudouridine
  modified_base 2143: mod_base = OTHER; note = N1-methylpseudouridine
  modified_base 2146: mod_base = OTHER; note = N1-methylpseudouridine
  modified_base 2147: mod_base = OTHER; note = N1-methylpseudouridine
  modified_base 2153: mod_base = OTHER; note = N1-methylpseudouridine
  modified_base 2155: mod_base = OTHER; note = N1-methylpseudouridine
  modified_base 2165: mod_base = OTHER; note = N1-methylpseudouridine
  modified_base 2174: mod_base = OTHER; note = N1-methylpseudouridine
  modified_base 2179: mod_base = OTHER; note = N1-methylpseudouridine
  modified_base 2183: mod_base = OTHER; note = N1-methylpseudouridine
  modified_base 2195: mod_base = OTHER; note = N1-methylpseudouridine
  modified_base 2209: mod_base = OTHER; note = N1-methylpseudouridine
  modified_base 2210: mod_base = OTHER; note = N1-methylpseudouridine
  modified_base 2213: mod_base = OTHER; note = N1-methylpseudouridine
  modified_base 2237: mod_base = OTHER; note = N1-methylpseudouridine
  modified_base 2240: mod_base = OTHER; note = N1-methylpseudouridine
  modified_base 2246: mod_base = OTHER; note = N1-methylpseudouridine
  modified_base 2249: mod_base = OTHER; note = N1-methylpseudouridine
  modified_base 2251: mod_base = OTHER; note = N1-methylpseudouridine
  modified_base 2252: mod_base = OTHER; note = N1-methylpseudouridine
  modified_base 2270: mod_base = OTHER; note = N1-methylpseudouridine
  modified_base 2276: mod_base = OTHER; note = N1-methylpseudouridine
  modified_base 2285: mod_base = OTHER; note = N1-methylpseudouridine
  modified_base 2296: mod_base = OTHER; note = N1-methylpseudouridine
  modified_base 2299: mod_base = OTHER; note = N1-methylpseudouridine
  modified_base 2300: mod_base = OTHER; note = N1-methylpseudouridine
  modified_base 2309: mod_base = OTHER; note = N1-methylpseudouridine
  modified_base 2314: mod_base = OTHER; note = N1-methylpseudouridine
  modified_base 2317: mod_base = OTHER; note = N1-methylpseudouridine
  modified_base 2318: mod_base = OTHER; note = N1-methylpseudouridine
  modified_base 2327: mod_base = OTHER; note = N1-methylpseudouridine
  modified_base 2333: mod_base = OTHER; note = N1-methylpseudouridine
  modified_base 2342: mod_base = OTHER; note = N1-methylpseudouridine
  modified_base 2353: mod_base = OTHER; note = N1-methylpseudouridine
  modified_base 2354: mod_base = OTHER; note = N1-methylpseudouridine
  modified_base 2366: mod_base = OTHER; note = N1-methylpseudouridine
  modified_base 2374: mod_base = OTHER; note = N1-methylpseudouridine
  modified_base 2384: mod_base = OTHER; note = N1-methylpseudouridine
  modified_base 2387: mod_base = OTHER; note = N1-methylpseudouridine
  modified_base 2393: mod_base = OTHER; note = N1-methylpseudouridine
  modified_base 2396: mod_base = OTHER; note = N1-methylpseudouridine
  modified_base 2410: mod_base = OTHER; note = N1-methylpseudouridine
  modified_base 2411: mod_base = OTHER; note = N1-methylpseudouridine
  modified_base 2414: mod_base = OTHER; note = N1-methylpseudouridine
  modified_base 2438: mod_base = OTHER; note = N1-methylpseudouridine
  modified_base 2441: mod_base = OTHER; note = N1-methylpseudouridine
  modified_base 2450: mod_base = OTHER; note = N1-methylpseudouridine
  modified_base 2453: mod_base = OTHER; note = N1-methylpseudouridine
  modified_base 2456: mod_base = OTHER; note = N1-methylpseudouridine
  modified_base 2462: mod_base = OTHER; note = N1-methylpseudouridine
  modified_base 2468: mod_base = OTHER; note = N1-methylpseudouridine
  modified_base 2470: mod_base = OTHER; note = N1-methylpseudouridine
  modified_base 2471: mod_base = OTHER; note = N1-methylpseudouridine
  modified_base 2486: mod_base = OTHER; note = N1-methylpseudouridine
  modified_base 2489: mod_base = OTHER; note = N1-methylpseudouridine
  modified_base 2501: mod_base = OTHER; note = N1-methylpseudouridine
  modified_base 2509: mod_base = OTHER; note = N1-methylpseudouridine
  modified_base 2519: mod_base = OTHER; note = N1-methylpseudouridine
  modified_base 2521: mod_base = OTHER; note = N1-methylpseudouridine
  modified_base 2522: mod_base = OTHER; note = N1-methylpseudouridine
  modified_base 2534: mod_base = OTHER; note = N1-methylpseudouridine
  modified_base 2537: mod_base = OTHER; note = N1-methylpseudouridine
  modified_base 2546: mod_base = OTHER; note = N1-methylpseudouridine
  modified_base 2560: mod_base = OTHER; note = N1-methylpseudouridine
  modified_base 2569: mod_base = OTHER; note = N1-methylpseudouridine
  modified_base 2579: mod_base = OTHER; note = N1-methylpseudouridine
  modified_base 2591: mod_base = OTHER; note = N1-methylpseudouridine
  modified_base 2594: mod_base = OTHER; note = N1-methylpseudouridine
  modified_base 2603: mod_base = OTHER; note = N1-methylpseudouridine
  modified_base 2630: mod_base = OTHER; note = N1-methylpseudouridine
  modified_base 2633: mod_base = OTHER; note = N1-methylpseudouridine
  modified_base 2638: mod_base = OTHER; note = N1-methylpseudouridine
  modified_base 2639: mod_base = OTHER; note = N1-methylpseudouridine
  modified_base 2642: mod_base = OTHER; note = N1-methylpseudouridine
  modified_base 2656: mod_base = OTHER; note = N1-methylpseudouridine
  modified_base 2657: mod_base = OTHER; note = N1-methylpseudouridine
  modified_base 2671: mod_base = OTHER; note = N1-methylpseudouridine
  modified_base 2672: mod_base = OTHER; note = N1-methylpseudouridine
  modified_base 2681: mod_base = OTHER; note = N1-methylpseudouridine
  modified_base 2684: mod_base = OTHER; note = N1-methylpseudouridine
  modified_base 2699: mod_base = OTHER; note = N1-methylpseudouridine
  modified_base 2704: mod_base = OTHER; note = N1-methylpseudouridine
  modified_base 2705: mod_base = OTHER; note = N1-methylpseudouridine
  modified_base 2717: mod_base = OTHER; note = N1-methylpseudouridine
  modified_base 2732: mod_base = OTHER; note = N1-methylpseudouridine
  modified_base 2753: mod_base = OTHER; note = N1-methylpseudouridine
  modified_base 2765: mod_base = OTHER; note = N1-methylpseudouridine
  modified_base 2774: mod_base = OTHER; note = N1-methylpseudouridine
  modified_base 2792: mod_base = OTHER; note = N1-methylpseudouridine
  modified_base 2804: mod_base = OTHER; note = N1-methylpseudouridine
  modified_base 2807: mod_base = OTHER; note = N1-methylpseudouridine
  modified_base 2816: mod_base = OTHER; note = N1-methylpseudouridine
  modified_base 2822: mod_base = OTHER; note = N1-methylpseudouridine
  modified_base 2825: mod_base = OTHER; note = N1-methylpseudouridine
  modified_base 2834: mod_base = OTHER; note = N1-methylpseudouridine
  modified_base 2837: mod_base = OTHER; note = N1-methylpseudouridine
  modified_base 2843: mod_base = OTHER; note = N1-methylpseudouridine
  modified_base 2846: mod_base = OTHER; note = N1-methylpseudouridine
  modified_base 2870: mod_base = OTHER; note = N1-methylpseudouridine
  modified_base 2873: mod_base = OTHER; note = N1-methylpseudouridine
  modified_base 2876: mod_base = OTHER; note = N1-methylpseudouridine
  modified_base 2882: mod_base = OTHER; note = N1-methylpseudouridine
  modified_base 2936: mod_base = OTHER; note = N1-methylpseudouridine
  modified_base 2945: mod_base = OTHER; note = N1-methylpseudouridine
  modified_base 2957: mod_base = OTHER; note = N1-methylpseudouridine
  modified_base 2966: mod_base = OTHER; note = N1-methylpseudouridine
  modified_base 2978: mod_base = OTHER; note = N1-methylpseudouridine
  modified_base 2981: mod_base = OTHER; note = N1-methylpseudouridine
  modified_base 2996: mod_base = OTHER; note = N1-methylpseudouridine
  modified_base 3011: mod_base = OTHER; note = N1-methylpseudouridine
  modified_base 3026: mod_base = OTHER; note = N1-methylpseudouridine
  modified_base 3028: mod_base = OTHER; note = N1-methylpseudouridine
  modified_base 3032: mod_base = OTHER; note = N1-methylpseudouridine
  modified_base 3034: mod_base = OTHER; note = N1-methylpseudouridine
  modified_base 3037: mod_base = OTHER; note = N1-methylpseudouridine
  modified_base 3041: mod_base = OTHER; note = N1-methylpseudouridine
  modified_base 3059: mod_base = OTHER; note = N1-methylpseudouridine
  modified_base 3061: mod_base = OTHER; note = N1-methylpseudouridine
  modified_base 3065: mod_base = OTHER; note = N1-methylpseudouridine
  modified_base 3077: mod_base = OTHER; note = N1-methylpseudouridine
  modified_base 3083: mod_base = OTHER; note = N1-methylpseudouridine
  modified_base 3092: mod_base = OTHER; note = N1-methylpseudouridine
  modified_base 3100: mod_base = OTHER; note = N1-methylpseudouridine
  modified_base 3107: mod_base = OTHER; note = N1-methylpseudouridine
  modified_base 3116: mod_base = OTHER; note = N1-methylpseudouridine
  modified_base 3119: mod_base = OTHER; note = N1-methylpseudouridine
  modified_base 3130: mod_base = OTHER; note = N1-methylpseudouridine
  modified_base 3131: mod_base = OTHER; note = N1-methylpseudouridine
  modified_base 3134: mod_base = OTHER; note = N1-methylpseudouridine
  modified_base 3149: mod_base = OTHER; note = N1-methylpseudouridine
  modified_base 3161: mod_base = OTHER; note = N1-methylpseudouridine
  modified_base 3164: mod_base = OTHER; note = N1-methylpseudouridine
  modified_base 3203: mod_base = OTHER; note = N1-methylpseudouridine
  modified_base 3218: mod_base = OTHER; note = N1-methylpseudouridine
  modified_base 3221: mod_base = OTHER; note = N1-methylpseudouridine
  modified_base 3230: mod_base = OTHER; note = N1-methylpseudouridine
  modified_base 3238: mod_base = OTHER; note = N1-methylpseudouridine
  modified_base 3241: mod_base = OTHER; note = N1-methylpseudouridine
  modified_base 3251: mod_base = OTHER; note = N1-methylpseudouridine
  modified_base 3254: mod_base = OTHER; note = N1-methylpseudouridine
  modified_base 3266: mod_base = OTHER; note = N1-methylpseudouridine
  modified_base 3269: mod_base = OTHER; note = N1-methylpseudouridine
  modified_base 3283: mod_base = OTHER; note = N1-methylpseudouridine
  modified_base 3284: mod_base = OTHER; note = N1-methylpseudouridine
  modified_base 3293: mod_base = OTHER; note = N1-methylpseudouridine
  modified_base 3317: mod_base = OTHER; note = N1-methylpseudouridine
  modified_base 3326: mod_base = OTHER; note = N1-methylpseudouridine
  modified_base 3340: mod_base = OTHER; note = N1-methylpseudouridine
  modified_base 3341: mod_base = OTHER; note = N1-methylpseudouridine
  modified_base 3344: mod_base = OTHER; note = N1-methylpseudouridine
  modified_base 3356: mod_base = OTHER; note = N1-methylpseudouridine
  modified_base 3359: mod_base = OTHER; note = N1-methylpseudouridine
  modified_base 3374: mod_base = OTHER; note = N1-methylpseudouridine
  modified_base 3386: mod_base = OTHER; note = N1-methylpseudouridine
  modified_base 3395: mod_base = OTHER; note = N1-methylpseudouridine
  modified_base 3398: mod_base = OTHER; note = N1-methylpseudouridine
  modified_base 3410: mod_base = OTHER; note = N1-methylpseudouridine
  modified_base 3421: mod_base = OTHER; note = N1-methylpseudouridine
  modified_base 3440: mod_base = OTHER; note = N1-methylpseudouridine
  modified_base 3443: mod_base = OTHER; note = N1-methylpseudouridine
  modified_base 3452: mod_base = OTHER; note = N1-methylpseudouridine
  modified_base 3458: mod_base = OTHER; note = N1-methylpseudouridine
  modified_base 3461: mod_base = OTHER; note = N1-methylpseudouridine
  modified_base 3467: mod_base = OTHER; note = N1-methylpseudouridine
  modified_base 3479: mod_base = OTHER; note = N1-methylpseudouridine
  modified_base 3482: mod_base = OTHER; note = N1-methylpseudouridine
  modified_base 3490: mod_base = OTHER; note = N1-methylpseudouridine
  modified_base 3491: mod_base = OTHER; note = N1-methylpseudouridine
  modified_base 3502: mod_base = OTHER; note = N1-methylpseudouridine
  modified_base 3503: mod_base = OTHER; note = N1-methylpseudouridine
  modified_base 3508: mod_base = OTHER; note = N1-methylpseudouridine
  modified_base 3509: mod_base = OTHER; note = N1-methylpseudouridine
  modified_base 3511: mod_base = OTHER; note = N1-methylpseudouridine
  modified_base 3518: mod_base = OTHER; note = N1-methylpseudouridine
  modified_base 3527: mod_base = OTHER; note = N1-methylpseudouridine
  modified_base 3535: mod_base = OTHER; note = N1-methylpseudouridine
  modified_base 3556: mod_base = OTHER; note = N1-methylpseudouridine
  modified_base 3560: mod_base = OTHER; note = N1-methylpseudouridine
  modified_base 3569: mod_base = OTHER; note = N1-methylpseudouridine
  modified_base 3572: mod_base = OTHER; note = N1-methylpseudouridine
  modified_base 3584: mod_base = OTHER; note = N1-methylpseudouridine
  modified_base 3587: mod_base = OTHER; note = N1-methylpseudouridine
  modified_base 3595: mod_base = OTHER; note = N1-methylpseudouridine
  modified_base 3605: mod_base = OTHER; note = N1-methylpseudouridine
  modified_base 3616: mod_base = OTHER; note = N1-methylpseudouridine
  modified_base 3617: mod_base = OTHER; note = N1-methylpseudouridine
  modified_base 3620: mod_base = OTHER; note = N1-methylpseudouridine
  modified_base 3622: mod_base = OTHER; note = N1-methylpseudouridine
  modified_base 3631: mod_base = OTHER; note = N1-methylpseudouridine
  modified_base 3638: mod_base = OTHER; note = N1-methylpseudouridine
  modified_base 3640: mod_base = OTHER; note = N1-methylpseudouridine
  modified_base 3647: mod_base = OTHER; note = N1-methylpseudouridine
  modified_base 3656: mod_base = OTHER; note = N1-methylpseudouridine
  modified_base 3659: mod_base = OTHER; note = N1-methylpseudouridine
  modified_base 3680: mod_base = OTHER; note = N1-methylpseudouridine
  modified_base 3700: mod_base = OTHER; note = N1-methylpseudouridine
  modified_base 3703: mod_base = OTHER; note = N1-methylpseudouridine
  modified_base 3704: mod_base = OTHER; note = N1-methylpseudouridine
  modified_base 3706: mod_base = OTHER; note = N1-methylpseudouridine
  modified_base 3707: mod_base = OTHER; note = N1-methylpseudouridine
  modified_base 3709: mod_base = OTHER; note = N1-methylpseudouridine
  modified_base 3719: mod_base = OTHER; note = N1-methylpseudouridine
  modified_base 3722: mod_base = OTHER; note = N1-methylpseudouridine
  modified_base 3727: mod_base = OTHER; note = N1-methylpseudouridine
  modified_base 3728: mod_base = OTHER; note = N1-methylpseudouridine
  modified_base 3730: mod_base = OTHER; note = N1-methylpseudouridine
  modified_base 3731: mod_base = OTHER; note = N1-methylpseudouridine
  modified_base 3743: mod_base = OTHER; note = N1-methylpseudouridine
  modified_base 3749: mod_base = OTHER; note = N1-methylpseudouridine
  modified_base 3764: mod_base = OTHER; note = N1-methylpseudouridine
  modified_base 3779: mod_base = OTHER; note = N1-methylpseudouridine
  modified_base 3782: mod_base = OTHER; note = N1-methylpseudouridine
  modified_base 3809: mod_base = OTHER; note = N1-methylpseudouridine
  modified_base 3812: mod_base = OTHER; note = N1-methylpseudouridine
  modified_base 3814: mod_base = OTHER; note = N1-methylpseudouridine
  modified_base 3832: mod_base = OTHER; note = N1-methylpseudouridine
  modified_base 3833: mod_base = OTHER; note = N1-methylpseudouridine
  modified_base 3842: mod_base = OTHER; note = N1-methylpseudouridine
  modified_base 3851: mod_base = OTHER; note = N1-methylpseudouridine
  modified_base 3854: mod_base = OTHER; note = N1-methylpseudouridine
  modified_base 3860: mod_base = OTHER; note = N1-methylpseudouridine
  modified_base 3869: mod_base = OTHER; note = N1-methylpseudouridine
  modified_base 3875: mod_base = OTHER; note = N1-methylpseudouridine
  modified_base 3878: mod_base = OTHER; note = N1-methylpseudouridine
  modified_base 3893: mod_base = OTHER; note = N1-methylpseudouridine
  modified_base 3907: mod_base = OTHER; note = N1-methylpseudouridine
  modified_base 3908: mod_base = OTHER; note = N1-methylpseudouridine
  modified_base 3923: mod_base = OTHER; note = N1-methylpseudouridine
  modified_base 3926: mod_base = OTHER; note = N1-methylpseudouridine
  modified_base 3950: mod_base = OTHER; note = N1-methylpseudouridine
  modified_base 3953: mod_base = OTHER; note = N1-methylpseudouridine
  modified_base 3970: mod_base = OTHER; note = N1-methylpseudouridine
  modified_base 3985: mod_base = OTHER; note = N1-methylpseudouridine
  modified_base 3994: mod_base = OTHER; note = N1-methylpseudouridine
  modified_base 3995: mod_base = OTHER; note = N1-methylpseudouridine
  modified_base 4010: mod_base = OTHER; note = N1-methylpseudouridine
  modified_base 4015: mod_base = OTHER; note = N1-methylpseudouridine
  modified_base 4022: mod_base = OTHER; note = N1-methylpseudouridine
  modified_base 4025: mod_base = OTHER; note = N1-methylpseudouridine
  modified_base 4028: mod_base = OTHER; note = N1-methylpseudouridine
  modified_base 4031: mod_base = OTHER; note = N1-methylpseudouridine
  modified_base 4040: mod_base = OTHER; note = N1-methylpseudouridine
  modified_base 4064: mod_base = OTHER; note = N1-methylpseudouridine
  modified_base 4073: mod_base = OTHER; note = N1-methylpseudouridine
  modified_base 4082: mod_base = OTHER; note = N1-methylpseudouridine
  modified_base 4085: mod_base = OTHER; note = N1-methylpseudouridine
  modified_base 4091: mod_base = OTHER; note = N1-methylpseudouridine
  modified_base 4097: mod_base = OTHER; note = N1-methylpseudouridine
  modified_base 4100: mod_base = OTHER; note = N1-methylpseudouridine
  modified_base 4114: mod_base = OTHER; note = N1-methylpseudouridine
  modified_base 4115: mod_base = OTHER; note = N1-methylpseudouridine
  modified_base 4130: mod_base = OTHER; note = N1-methylpseudouridine
  modified_base 4135: mod_base = OTHER; note = N1-methylpseudouridine
  modified_base 4136: mod_base = OTHER; note = N1-methylpseudouridine
  modified_base 4139: mod_base = OTHER; note = N1-methylpseudouridine
  modified_base 4153: mod_base = OTHER; note = N1-methylpseudouridine
  modified_base 4163: mod_base = OTHER; note = N1-methylpseudouridine
  modified_base 4175: mod_base = OTHER; note = N1-methylpseudouridine
  modified_base 4178: mod_base = OTHER; note = N1-methylpseudouridine
  modified_base 4181: mod_base = OTHER; note = N1-methylpseudouridine
  modified_base 4187: mod_base = OTHER; note = N1-methylpseudouridine
  modified_base 4195: mod_base = OTHER; note = N1-methylpseudouridine
  modified_base 4202: mod_base = OTHER; note = N1-methylpseudouridine
  modified_base 4204: mod_base = OTHER; note = N1-methylpseudouridine
  modified_base 4205: mod_base = OTHER; note = N1-methylpseudouridine
  modified_base 4211: mod_base = OTHER; note = N1-methylpseudouridine
  modified_base 4232: mod_base = OTHER; note = N1-methylpseudouridine
  modified_base 4235: mod_base = OTHER; note = N1-methylpseudouridine
  modified_base 4253: mod_base = OTHER; note = N1-methylpseudouridine
  modified_base 4271: mod_base = OTHER; note = N1-methylpseudouridine
  modified_base 4277: mod_base = OTHER; note = N1-methylpseudouridine
  modified_base 4288: mod_base = OTHER; note = N1-methylpseudouridine
  modified_base 4292: mod_base = OTHER; note = N1-methylpseudouridine
  modified_base 4297: mod_base = OTHER; note = N1-methylpseudouridine
  modified_base 4298: mod_base = OTHER; note = N1-methylpseudouridine
  modified_base 4301: mod_base = OTHER; note = N1-methylpseudouridine
  modified_base 4303: mod_base = OTHER; note = N1-methylpseudouridine
  modified_base 4307: mod_base = OTHER; note = N1-methylpseudouridine
  modified_base 4318: mod_base = OTHER; note = N1-methylpseudouridine
  modified_base 4328: mod_base = OTHER; note = N1-methylpseudouridine
  modified_base 4364: mod_base = OTHER; note = N1-methylpseudouridine
  modified_base 4366: mod_base = OTHER; note = N1-methylpseudouridine
  modified_base 4367: mod_base = OTHER; note = N1-methylpseudouridine
  modified_base 4370: mod_base = OTHER; note = N1-methylpseudouridine
  modified_base 4387: mod_base = OTHER; note = N1-methylpseudouridine
  modified_base 4391: mod_base = OTHER; note = N1-methylpseudouridine
  modified_base 4400: mod_base = OTHER; note = N1-methylpseudouridine
  modified_base 4403: mod_base = OTHER; note = N1-methylpseudouridine
  modified_base 4412: mod_base = OTHER; note = N1-methylpseudouridine
  modified_base 4420: mod_base = OTHER; note = N1-methylpseudouridine
  modified_base 4421: mod_base = OTHER; note = N1-methylpseudouridine
  modified_base 4433: mod_base = OTHER; note = N1-methylpseudouridine
  modified_base 4436: mod_base = OTHER; note = N1-methylpseudouridine
  modified_base 4439: mod_base = OTHER; note = N1-methylpseudouridine
  modified_base 4454: mod_base = OTHER; note = N1-methylpseudouridine
  modified_base 4463: mod_base = OTHER; note = N1-methylpseudouridine
  modified_base 4466: mod_base = OTHER; note = N1-methylpseudouridine
  modified_base 4474: mod_base = OTHER; note = N1-methylpseudouridine
  modified_base 4499: mod_base = OTHER; note = N1-methylpseudouridine
  modified_base 4520: mod_base = OTHER; note = N1-methylpseudouridine
  modified_base 4523: mod_base = OTHER; note = N1-methylpseudouridine
  modified_base 4529: mod_base = OTHER; note = N1-methylpseudouridine
  modified_base 4531: mod_base = OTHER; note = N1-methylpseudouridine
  modified_base 4532: mod_base = OTHER; note = N1-methylpseudouridine
  modified_base 4538: mod_base = OTHER; note = N1-methylpseudouridine
  modified_base 4547: mod_base = OTHER; note = N1-methylpseudouridine
  modified_base 4564: mod_base = OTHER; note = N1-methylpseudouridine
  modified_base 4565: mod_base = OTHER; note = N1-methylpseudouridine
  modified_base 4570: mod_base = OTHER; note = N1-methylpseudouridine
  modified_base 4573: mod_base = OTHER; note = N1-methylpseudouridine
  modified_base 4574: mod_base = OTHER; note = N1-methylpseudouridine
  modified_base 4586: mod_base = OTHER; note = N1-methylpseudouridine
  modified_base 4600: mod_base = OTHER; note = N1-methylpseudouridine
  modified_base 4619: mod_base = OTHER; note = N1-methylpseudouridine
  modified_base 4622: mod_base = OTHER; note = N1-methylpseudouridine
  modified_base 4634: mod_base = OTHER; note = N1-methylpseudouridine
  modified_base 4637: mod_base = OTHER; note = N1-methylpseudouridine
  modified_base 4649: mod_base = OTHER; note = N1-methylpseudouridine
  modified_base 4658: mod_base = OTHER; note = N1-methylpseudouridine
  modified_base 4660: mod_base = OTHER; note = N1-methylpseudouridine
  modified_base 4673: mod_base = OTHER; note = N1-methylpseudouridine
  modified_base 4679: mod_base = OTHER; note = N1-methylpseudouridine
  modified_base 4688: mod_base = OTHER; note = N1-methylpseudouridine
  modified_base 4735: mod_base = OTHER; note = N1-methylpseudouridine
  modified_base 4736: mod_base = OTHER; note = N1-methylpseudouridine
  modified_base 4763: mod_base = OTHER; note = N1-methylpseudouridine
  modified_base 4765: mod_base = OTHER; note = N1-methylpseudouridine
atgagcgaggtggagttcagccacgagtactggatgcggcacgccctgaccctggccaagcgggcccgggacgagcgggaggtgcccgtgggcgccgtgctggtgctgaacaaccgggtgatcggcgagggctggaaccgggccatcggcctgcacgaccccaccgcccacgccgagatcatggccctgcggcagggcggcctggtgatgcagaactaccggctgatcgacgccaccctgtacgtgaccttcgagccctgcgtgatgtgcgccggcgccatgatccacagccggatcggccgggtggtgttcggcgtgcggaacgccaagaccggcgccgccggcagcctgatggacgtgctgcaccaccccggcatgaaccaccgggtggagatcaccgagggcatcctggccgacgagtgcgccgccctgctgtgccggttcttccggatgccccggcgggtgttcaacgcccagaagaaggcccagagcagcaccgacagcggcggcagcagcggcggcagcagcggcagcgagacacccggcaccagcgagagcgccacccccgagagcagcggcggcagcagcggcggcagcgacaagaagtacagcatcggcctggccatcggcaccaacagcgtgggctgggccgtgatcaccgacgagtacaaggtgcccagcaagaagttcaaggtgctgggcaacaccgaccggcacagcatcaagaagaacctgatcggcgccctgctgttcgacagcggcgagacagccgaggccacccggctgaagcggaccgcccggcggcggtacacccggcggaagaaccggatctgctacctgcaggagatcttcagcaacgagatggccaaggtggacgacagcttcttccaccggctggaggagagcttcctggtggaggaggacaagaagcacgagcggcaccccatcttcggcaacatcgtggacgaggtggcctaccacgagaagtaccccaccatctaccacctgcggaagaagctggtggacagcaccgacaaggccgacctgcggctgatctacctggccctggcccacatgatcaagttccggggccacttcctgatcgagggcgacctgaaccccgacaacagcgacgtggacaagctgttcatccagctggtgcagacctacaaccagctgttcgaggagaaccccatcaacgccagcggcgtggacgccaaggccatcctgagcgcccggctgagcaagagccggcggctggagaacctgatcgcccagctgcccggcgagaagaagaacggcctgttcggcaacctgatcgccctgagcctgggcctgacccccaacttcaagagcaacttcgacctggccgaggacgccaagctgcagctgagcaaggacacctacgacgacgacctggacaacctgctggcccagatcggcgaccagtacgccgacctgttcctggccgccaagaacctgagcgacgccatcctgctgagcgacatcctgcgggtgaacaccgagatcaccaaggcccccctgagcgccagcatgatcaagcggtacgacgagcaccaccaggacctgaccctgctgaaggccctggtgcggcagcagctgcccgagaagtacaaggagatcttcttcgaccagagcaagaacggctacgccggctacatcgacggcggcgccagccaggaggagttctacaagttcatcaagcccatcctggagaagatggacggcaccgaggagctgctggtgaagctgaaccgggaggacctgctgcggaagcagcggaccttcgacaacggcagcatcccccaccagatccacctgggcgagctgcacgccatcctgcggcggcaggaggacttctaccccttcctgaaggacaaccgggagaagatcgagaagatcctgaccttccggatcccctactacgtgggccccctggcccggggcaacagccggttcgcctggatgacccgcaagagcgaggagacaatcaccccctggaacttcgaggaggtggtggacaagggcgccagcgcccagagcttcatcgagcggatgaccaacttcgacaagaacctgcccaacgagaaggtgctgcccaagcacagcctgctgtacgagtacttcaccgtgtacaacgagctgaccaaggtgaagtacgtgaccgagggcatgcggaagcccgccttcctgagcggcgagcagaagaaggccatcgtggacctgctgttcaagaccaaccggaaggtgaccgtgaagcagctgaaggaggactacttcaagaagatcgagtgcttcgacagcgtggagatcagcggcgtggaggaccggttcaacgccagcctgggcacctaccacgacctgctgaagatcatcaaggacaaggacttcctggacaacgaggagaacgaggacatcctggaggacatcgtgctgaccctgaccctgttcgaggaccgggagatgatcgaggagcggctgaagacctacgcccacctgttcgacgacaaggtgatgaagcagctgaagcggcggcggtacaccggctggggccggctgagccggaagctgatcaacggcatccgggacaagcagagcggcaagaccatcctggacttcctcaagagcgacggcttcgccaaccgggccttcgccgccctgatcgccgacgacagcctgaccttcaaggaggacatccagaaggcccaggtgagcggccagggcgacagcctgcacgagcacatcgccaacctggccggcagccccgccatcaagaagggcatcctgcagaccgtgaaggtggtggacgagctggtgaaggtgatgggccggcacaagcccgagaacatcgtgatcgagatggcccgggagaaccagaccacccagaagggccagaagaacagccgggagcggatgaagcggatcgaggagggcatcaaggagctgggcagccagatcctgaaggagcaccccgtggagaacacccagctgcagaacgagaagctgtacctgtactacctgcagaacggccgggacatgtacgtggaccaggagctggacatcaaccggctgagcgactacgacgtggaccacatcgtgccccagagcttcctgaaggacgacagcatcgacaacaaggtgctgacccggagcgacaagaaccggggcaagagcgacaacgtgcccagcgaggaggtggtgaagaagatgaagaactactggcggcagctgctgaacgccaagctgatcacccagcggaagttcgacaacctgaccaaggccgagcggggcggcctgagcgagctggacaaggccggcttcatcaagcggcagctggtggagacacggcagatcaccaagcacgtggcccagatcctggacagccggatgaacaccaagtacgacgagaacgacaagctgatccgggaggtgaaggtgatcaccctcaagagcaagctggtgagcgacttccggaaggacttccagttctacaaggtgcgggagatcaacaactaccaccacgcccacgacgcctacctgaacgccgtggtgggcaccgccctgatcaagaagtaccccaagctggagagcgagttcgtgtacggcgactacaaggtgtacgacgtgcggaagatgatcgccaagagcgagcaggagatcggcaaggccaccgccaagtacttcttctacagcaacatcatgaacttcttcaagaccgagatcaccctggccaacggcgagatccggaagcggcccctgatcgagacaaacggcgagacaggcgagatcgtgtgggacaagggccgggacttcgccaccgtgcggaaggtgctgagcatgccccaggtgaacatcgtgaagaagaccgaggtgcagaccggcggcttcagcaaggagagcatcctgcccaagcggaacagcgacaagctgatcgcccggaagaaggactgggaccccaagaagtacggcggcttcgacagccccaccgtggcctacagcgtgctggtggtggccaaggtggagaagggcaagagcaagaagctcaagagcgtgaaggagctgctgggcatcaccatcatggagcggagcagcttcgagaagaaccccatcgacttcctggaggccaagggctacaaggaggtgaagaaggacctgatcatcaagctgcccaagtacagcctgttcgagctggagaacggccggaagcggatgctggccagcgccggcgagctgcagaagggcaacgagctggccctgcccagcaagtacgtgaacttcctgtacctggccagccactacgagaagctgaagggcagccccgaggacaacgagcagaagcagctgttcgtggagcagcacaagcactacctggacgagatcatcgagcagatcagcgagttcagcaagcgggtgatcctggccgacgccaacctggacaaggtgctgagcgcctacaacaagcaccgggacaagcccatccgggagcaggccgagaacatcatccacctgttcaccctgaccaacctgggcgcccccgccgccttcaagtacttcgacaccaccatcgaccggaagcggtacaccagcaccaaggaggtgctggacgccaccctgatccaccagagcatcaccggcctgtacgagacacggatcgacctgagccagctgggcggcgacgagggcgccgacaagcggaccgccgacggcagcgagttcgagagccccaagaagaagcggaaggtgtga

SEQ ID NO: 724 - protein, 1588 aa, synthetic construct
MSEVEFSHEYWMRHALTLAKRARDEREVPVGAVLVLNNRVIGEGWNRAIGLHDPTAHAEIMALRQGGLVMQNYRLIDATLYVTFEPCVMCAGAMIHSRIGRVVFGVRNAKTGAAGSLMDVLHHPGMNHRVEITEGILADECAALLCRFFRMPRRVFNAQKKAQSSTDSGGSSGGSSGSETPGTSESATPESSGGSSGGSDKKYSIGLAIGTNSVGWAVITDEYKVPSKKFKVLGNTDRHSIKKNLIGALLFDSGETAEATRLKRTARRRYTRRKNRICYLQEIFSNEMAKVDDSFFHRLEESFLVEEDKKHERHPIFGNIVDEVAYHEKYPTIYHLRKKLVDSTDKADLRLIYLALAHMIKFRGHFLIEGDLNPDNSDVDKLFIQLVQTYNQLFEENPINASGVDAKAILSARLSKSRRLENLIAQLPGEKKNGLFGNLIALSLGLTPNFKSNFDLAEDAKLQLSKDTYDDDLDNLLAQIGDQYADLFLAAKNLSDAILLSDILRVNTEITKAPLSASMIKRYDEHHQDLTLLKALVRQQLPEKYKEIFFDQSKNGYAGYIDGGASQEEFYKFIKPILEKMDGTEELLVKLNREDLLRKQRTFDNGSIPHQIHLGELHAILRRQEDFYPFLKDNREKIEKILTFRIPYYVGPLARGNSRFAWMTRKSEETITPWNFEEVVDKGASAQSFIERMTNFDKNLPNEKVLPKHSLLYEYFTVYNELTKVKYVTEGMRKPAFLSGEQKKAIVDLLFKTNRKVTVKQLKEDYFKKIECFDSVEISGVEDRFNASLGTYHDLLKIIKDKDFLDNEENEDILEDIVLTLTLFEDREMIEERLKTYAHLFDDKVMKQLKRRRYTGWGRLSRKLINGIRDKQSGKTILDFLKSDGFANRAFAALIADDSLTFKEDIQKAQVSGQGDSLHEHIANLAGSPAIKKGILQTVKVVDELVKVMGRHKPENIVIEMARENQTTQKGQKNSRERMKRIEEGIKELGSQILKEHPVENTQLQNEKLYLYYLQNGRDMYVDQELDINRLSDYDVDHIVPQSFLKDDSIDNKVLTRSDKNRGKSDNVPSEEVVKKMKNYWRQLLNAKLITQRKFDNLTKAERGGLSELDKAGFIKRQLVETRQITKHVAQILDSRMNTKYDENDKLIREVKVITLKSKLVSDFRKDFQFYKVREINNYHHAHDAYLNAVVGTALIKKYPKLESEFVYGDYKVYDVRKMIAKSEQEIGKATAKYFFYSNIMNFFKTEITLANGEIRKRPLIETNGETGEIVWDKGRDFATVRKVLSMPQVNIVKKTEVQTGGFSKESILPKRNSDKLIARKKDWDPKKYGGFDSPTVAYSVLVVAKVEKGKSKKLKSVKELLGITIMERSSFEKNPIDFLEAKGYKEVKKDLIIKLPKYSLFELENGRKRMLASAGELQKGNELALPSKYVNFLYLASHYEKLKGSPEDNEQKQLFVEQHKHYLDEIIEQISEFSKRVILADANLDKVLSAYNKHRDKPIREQAENIIHLFTLTNLGAPAAFKYFDTTIDRKRYTSTKEVLDATLIHQSITGLYETRIDLSQLGGDEGADKRTADGSEFESPKKKRKV

SEQ ID NO: 725 - RNA, 4767 nt, synthetic construct
  source 1..4767: mol_type = other RNA
  modified_base 2: mod_base = OTHER; note = N1-methylpseudouridine
  modified_base 11: mod_base = OTHER; note = N1-methylpseudouridine
  modified_base 16: mod_base = OTHER; note = N1-methylpseudouridine
  modified_base 17: mod_base = OTHER; note = N1-methylpseudouridine
  modified_base 28: mod_base = OTHER; note = N1-methylpseudouridine
  modified_base 31: mod_base = OTHER; note = N1-methylpseudouridine
  modified_base 35: mod_base = OTHER; note = N1-methylpseudouridine
  modified_base 47: mod_base = OTHER; note = N1-methylpseudouridine
  modified_base 53: mod_base = OTHER; note = N1-methylpseudouridine
  modified_base 83: mod_base = OTHER; note = N1-methylpseudouridine
  modified_base 89: mod_base = OTHER; note = N1-methylpseudouridine
  modified_base 98: mod_base = OTHER; note = N1-methylpseudouridine
  modified_base 101: mod_base = OTHER; note = N1-methylpseudouridine
  modified_base 104: mod_base = OTHER; note = N1-methylpseudouridine
  modified_base 107: mod_base = OTHER; note = N1-methylpseudouridine
  modified_base 119: mod_base = OTHER; note = N1-methylpseudouridine
  modified_base 122: mod_base = OTHER; note = N1-methylpseudouridine
  modified_base 133: mod_base = OTHER; note = N1-methylpseudouridine
  modified_base 146: mod_base = OTHER; note = N1-methylpseudouridine
  modified_base 152: mod_base = OTHER; note = N1-methylpseudouridine
  modified_base 179: mod_base = OTHER; note = N1-methylpseudouridine
  modified_base 182: mod_base = OTHER; note = N1-methylpseudouridine
  modified_base 188: mod_base = OTHER; note = N1-methylpseudouridine
  modified_base 203: mod_base = OTHER; note = N1-methylpseudouridine
  modified_base 206: mod_base = OTHER; note = N1-methylpseudouridine
  modified_base 209: mod_base = OTHER; note = N1-methylpseudouridine
  modified_base 217: mod_base = OTHER; note = N1-methylpseudouridine
  modified_base 224: mod_base = OTHER; note = N1-methylpseudouridine
  modified_base 227: mod_base = OTHER; note = N1-methylpseudouridine
  modified_base 239: mod_base = OTHER; note = N1-methylpseudouridine
  modified_base 241: mod_base = OTHER; note = N1-methylpseudouridine
  modified_base 245: mod_base = OTHER; note = N1-methylpseudouridine
  modified_base 250: mod_base = OTHER; note = N1-methylpseudouridine
  modified_base 251: mod_base = OTHER; note = N1-methylpseudouridine
  modified_base 259: mod_base = OTHER; note = N1-methylpseudouridine
  modified_base 263: mod_base = OTHER; note = N1-methylpseudouridine
  modified_base 266: mod_base = OTHER; note = N1-methylpseudouridine
  modified_base 268: mod_base = OTHER; note = N1-methylpseudouridine
  modified_base 281: mod_base = OTHER; note = N1-methylpseudouridine
  modified_base 284: mod_base = OTHER; note = N1-methylpseudouridine
  modified_base 296: mod_base = OTHER; note = N1-methylpseudouridine
  modified_base 305: mod_base = OTHER; note = N1-methylpseudouridine
  modified_base 308: mod_base = OTHER; note = N1-methylpseudouridine
  modified_base 310: mod_base = OTHER; note = N1-methylpseudouridine
  modified_base 311: mod_base = OTHER; note = N1-methylpseudouridine
  modified_base 317: mod_base = OTHER; note = N1-methylpseudouridine
  modified_base 350: mod_base = OTHER; note = N1-methylpseudouridine
  modified_base 353: mod_base = OTHER; note = N1-methylpseudouridine
  modified_base 359: mod_base = OTHER; note = N1-methylpseudouridine
  modified_base 362: mod_base = OTHER; note = N1-methylpseudouridine
  modified_base 377: mod_base = OTHER; note = N1-methylpseudouridine
  modified_base 389: mod_base = OTHER; note = N1-methylpseudouridine
  modified_base 395: mod_base = OTHER; note = N1-methylpseudouridine
  modified_base 407: mod_base = OTHER; note = N1-methylpseudouridine
  modified_base 410: mod_base = OTHER; note = N1-methylpseudouridine
  modified_base 421: mod_base = OTHER; note = N1-methylpseudouridine
  modified_base 431: mod_base = OTHER; note = N1-methylpseudouridine
  modified_base 434: mod_base = OTHER; note = N1-methylpseudouridine
  modified_base 436: mod_base = OTHER; note = N1-methylpseudouridine
  modified_base 442: mod_base = OTHER; note = N1-methylpseudouridine
  modified_base 443: mod_base = OTHER; note = N1-methylpseudouridine
  modified_base 445: mod_base = OTHER; note = N1-methylpseudouridine
  modified_base 446: mod_base = OTHER; note = N1-methylpseudouridine
  modified_base 452: mod_base = OTHER; note = N1-methylpseudouridine
  modified_base 464: mod_base = OTHER; note = N1-methylpseudouridine
  modified_base 466: mod_base = OTHER; note = N1-methylpseudouridine
  modified_base 467: mod_base = OTHER; note = N1-methylpseudouridine
  modified_base 607: mod_base = OTHER; note = N1-methylpseudouridine
  modified_base 614: mod_base = OTHER; note = N1-methylpseudouridine
  modified_base 620: mod_base = OTHER; note = N1-methylpseudouridine
  modified_base 626: mod_base = OTHER; note = N1-methylpseudouridine
  modified_base 641: mod_base = OTHER; note = N1-methylpseudouridine
  modified_base 646: mod_base = OTHER; note = N1-methylpseudouridine
  modified_base 653: mod_base = OTHER; note = N1-methylpseudouridine
  modified_base 656: mod_base = OTHER; note = N1-methylpseudouridine
  modified_base 667: mod_base = OTHER; note = N1-methylpseudouridine
  modified_base 674: mod_base = OTHER; note = N1-methylpseudouridine
  modified_base 688: mod_base = OTHER; note = N1-methylpseudouridine
  modified_base 689: mod_base = OTHER; note = N1-methylpseudouridine
  modified_base 695: mod_base = OTHER; note = N1-methylpseudouridine
  modified_base 698: mod_base = OTHER; note = N1-methylpseudouridine
  modified_base 722: mod_base = OTHER; note = N1-methylpseudouridine
  modified_base 734: mod_base = OTHER; note = N1-methylpseudouridine
  modified_base 737: mod_base = OTHER; note = N1-methylpseudouridine
  modified_base 746: mod_base = OTHER; note = N1-methylpseudouridine
  modified_base 749: mod_base = OTHER; note = N1-methylpseudouridine
  modified_base 751: mod_base = OTHER; note = N1-methylpseudouridine
  modified_base 752: mod_base = OTHER; note = N1-methylpseudouridine
  modified_base 785: mod_base = OTHER; note = N1-methylpseudouridine
  modified_base 808: mod_base = OTHER; note = N1-methylpseudouridine
  modified_base 830: mod_base = OTHER; note = N1-methylpseudouridine
  modified_base 832: mod_base = OTHER; note = N1-methylpseudouridine
  modified_base 835: mod_base = OTHER; note = N1-methylpseudouridine
  modified_base 839: mod_base = OTHER; note = N1-methylpseudouridine
  modified_base 848: mod_base = OTHER; note = N1-methylpseudouridine
  modified_base 850: mod_base = OTHER; note = N1-methylpseudouridine
  modified_base 851: mod_base = OTHER; note = N1-methylpseudouridine
  modified_base 863: mod_base = OTHER; note = N1-methylpseudouridine
  modified_base 872: mod_base = OTHER; note = N1-methylpseudouridine
  modified_base 883: mod_base = OTHER; note = N1-methylpseudouridine
  modified_base 884: mod_base = OTHER; note = N1-methylpseudouridine
  modified_base 886: mod_base = OTHER; note = N1-methylpseudouridine
  modified_base 887: mod_base = OTHER; note = N1-methylpseudouridine
  modified_base 896: mod_base = OTHER; note = N1-methylpseudouridine
  modified_base 907: mod_base = OTHER; note = N1-methylpseudouridine
  modified_base 908: mod_base = OTHER; note = N1-methylpseudouridine
  modified_base 911: mod_base = OTHER; note = N1-methylpseudouridine
  modified_base 914: mod_base = OTHER; note = N1-methylpseudouridine
  modified_base 947: mod_base = OTHER; note = N1-methylpseudouridine
  modified_base 949: mod_base = OTHER; note = N1-methylpseudouridine
  modified_base 950: mod_base = OTHER; note = N1-methylpseudouridine
  modified_base 959: mod_base = OTHER; note = N1-methylpseudouridine
  modified_base 962: mod_base = OTHER; note = N1-methylpseudouridine
  modified_base 971: mod_base = OTHER; note = N1-methylpseudouridine
  modified_base 976: mod_base = OTHER; note = N1-methylpseudouridine
  modified_base 988: mod_base = OTHER; note = N1-methylpseudouridine
  modified_base 998: mod_base = OTHER; note = N1-methylpseudouridine
  modified_base 1000: mod_base = OTHER; note = N1-methylpseudouridine
  modified_base 1007: mod_base = OTHER; note = N1-methylpseudouridine
  modified_base 1019: mod_base = OTHER; note = N1-methylpseudouridine
  modified_base 1022: mod_base = OTHER; note = N1-methylpseudouridine
  modified_base 1046: mod_base = OTHER; note = N1-methylpseudouridine
  modified_base 1052: mod_base = OTHER; note = N1-methylpseudouridine
  modified_base 1055: mod_base = OTHER; note = N1-methylpseudouridine
  modified_base 1057: mod_base = OTHER; note = N1-methylpseudouridine
  modified_base 1061: mod_base = OTHER; note = N1-methylpseudouridine
  modified_base 1067: mod_base = OTHER; note = N1-methylpseudouridine
  modified_base 1076: mod_base = OTHER; note = N1-methylpseudouridine
  modified_base 1079: mod_base = OTHER; note = N1-methylpseudouridine
  modified_base 1084: mod_base = OTHER; note = N1-methylpseudouridine
  modified_base 1085: mod_base = OTHER; note = N1-methylpseudouridine
  modified_base 1096: mod_base = OTHER; note = N1-methylpseudouridine
  modified_base 1097: mod_base = OTHER; note = N1-methylpseudouridine
  modified_base 1100: mod_base = OTHER; note = N1-methylpseudouridine
  modified_base 1103: mod_base = OTHER; note = N1-methylpseudouridine
  modified_base 1115: mod_base = OTHER; note = N1-methylpseudouridine
  modified_base 1136: mod_base = OTHER; note = N1-methylpseudouridine
  modified_base 1145: mod_base = OTHER; note = N1-methylpseudouridine
  modified_base 1147: mod_base = OTHER; note = N1-methylpseudouridine
  modified_base 1148: mod_base = OTHER; note = N1-methylpseudouridine
  modified_base 1151: mod_base = OTHER; note = N1-methylpseudouridine
  modified_base 1157: mod_base = OTHER; note = N1-methylpseudouridine
  modified_base 1160: mod_base = OTHER; note = N1-methylpseudouridine
  modified_base 1168: mod_base = OTHER; note = N1-methylpseudouridine
  modified_base 1178: mod_base = OTHER; note = N1-methylpseudouridine
  modified_base 1180: mod_base = OTHER; note = N1-methylpseudouridine
  modified_base 1181: mod_base = OTHER; note = N1-methylpseudouridine
  modified_base 1196: mod_base = OTHER; note = N1-methylpseudouridine
  modified_base 1211: mod_base = OTHER; note = N1-methylpseudouridine
  modified_base 1226: mod_base = OTHER; note = N1-methylpseudouridine
  modified_base 1229: mod_base = OTHER; note = N1-methylpseudouridine
  modified_base 1241: mod_base = OTHER; note = N1-methylpseudouridine
  modified_base 1259: mod_base = OTHER; note = N1-methylpseudouridine
  modified_base 1268: mod_base = OTHER; note = N1-methylpseudouridine
  modified_base 1271: mod_base = OTHER; note = N1-methylpseudouridine
  modified_base 1280: mod_base = OTHER; note = N1-methylpseudouridine
  modified_base 1304: mod_base = OTHER; note = N1-methylpseudouridine
  modified_base 1306: mod_base = OTHER; note = N1-methylpseudouridine
  modified_base 1307: mod_base = OTHER; note = N1-methylpseudouridine
  modified_base 1316: mod_base = OTHER; note = N1-methylpseudouridine
  modified_base 1319: mod_base = OTHER; note = N1-methylpseudouridine
  modified_base 1325: mod_base = OTHER; note = N1-methylpseudouridine
  modified_base 1331: mod_base = OTHER; note = N1-methylpseudouridine
  modified_base 1337: mod_base = OTHER; note = N1-methylpseudouridine
  modified_base 1348: mod_base = OTHER; note = N1-methylpseudouridine
  modified_base 1349: mod_base = OTHER; note = N1-methylpseudouridine
  modified_base 1360: mod_base = OTHER; note = N1-methylpseudouridine
  modified_base 1361: mod_base = OTHER; note = N1-methylpseudouridine
  modified_base 1367: mod_base = OTHER; note = N1-methylpseudouridine
  modified_base 1385: mod_base = OTHER; note = N1-methylpseudouridine
  modified_base 1391: mod_base = OTHER; note = N1-methylpseudouridine
  modified_base 1405: mod_base = OTHER; note = N1-methylpseudouridine
  modified_base 1418: mod_base = OTHER; note = N1-methylpseudouridine
  modified_base 1427: mod_base = OTHER; note = N1-methylpseudouridine
  modified_base 1430: mod_base = OTHER; note = N1-methylpseudouridine
  modified_base 1439: mod_base = OTHER; note = N1-methylpseudouridine
  modified_base 1450: mod_base = OTHER; note = N1-methylpseudouridine
  modified_base 1460: mod_base = OTHER; note = N1-methylpseudouridine
  modified_base 1462: mod_base = OTHER; note = N1-methylpseudouridine
  modified_base 1463: mod_base = OTHER; note = N1-methylpseudouridine
  modified_base 1466: mod_base = OTHER; note = N1-methylpseudouridine
  modified_base 1481: mod_base = OTHER; note = N1-methylpseudouridine
  modified_base 1493: mod_base = OTHER; note = N1-methylpseudouridine
  modified_base 1496: mod_base = OTHER; note = N1-methylpseudouridine
  modified_base 1499: mod_base = OTHER; note = N1-methylpseudouridine
  modified_base 1508: mod_base = OTHER; note = N1-methylpseudouridine
  modified_base 1511: mod_base = OTHER; note = N1-methylpseudouridine
  modified_base 1517: mod_base = OTHER; note = N1-methylpseudouridine
  modified_base 1529: mod_base = OTHER; note = N1-methylpseudouridine
  modified_base 1544: mod_base = OTHER; note = N1-methylpseudouridine
  modified_base 1556: mod_base = OTHER; note = N1-methylpseudouridine
  modified_base 1559: mod_base = OTHER; note = N1-methylpseudouridine
  modified_base 1567: mod_base = OTHER; note = N1-methylpseudouridine
  modified_base 1589: mod_base = OTHER; note = N1-methylpseudouridine
  modified_base 1595: mod_base = OTHER; note = N1-methylpseudouridine
  modified_base 1598: mod_base = OTHER; note = N1-methylpseudouridine
  modified_base 1607: mod_base = OTHER; note = N1-methylpseudouridine
  modified_base 1610: mod_base = OTHER; note = N1-methylpseudouridine
  modified_base 1622: mod_base = OTHER; note = N1-methylpseudouridine
  modified_base 1633: mod_base = OTHER; note = N1-methylpseudouridine
  modified_base 1643: mod_base = OTHER; note = N1-methylpseudouridine
  modified_base 1645: mod_base = OTHER; note = N1-methylpseudouridine
  modified_base 1646: mod_base = OTHER; note = N1-methylpseudouridine
  modified_base 1648: mod_base = OTHER; note = N1-methylpseudouridine
  modified_base 1649: mod_base = OTHER; note = N1-methylpseudouridine
  modified_base 1669: mod_base = OTHER; note = N1-methylpseudouridine
  modified_base 1678: mod_base = OTHER; note = N1-methylpseudouridine
  modified_base 1682: mod_base = OTHER; note = N1-methylpseudouridine
  modified_base 1708: mod_base = OTHER; note = N1-methylpseudouridine
  modified_base 1709: mod_base = OTHER; note = N1-methylpseudouridine
  modified_base 1711: mod_base = OTHER; note = N1-methylpseudouridine
  modified_base 1717: mod_base = OTHER; note = N1-methylpseudouridine
  modified_base 1718: mod_base = OTHER; note = N1-methylpseudouridine
  modified_base 1721: mod_base = OTHER; note = N1-methylpseudouridine
  modified_base 1730: mod_base = OTHER; note = N1-methylpseudouridine
  modified_base 1733: mod_base = OTHER; note = N1-methylpseudouridine
  modified_base 1742: mod_base = OTHER; note = N1-methylpseudouridine
  modified_base 1760: mod_base = OTHER; note = N1-methylpseudouridine
  modified_base 1763: mod_base = OTHER; note = N1-methylpseudouridine
  modified_base 1766: mod_base = OTHER; note = N1-methylpseudouridine
  modified_base 1772: mod_base = OTHER; note = N1-methylpseudouridine
  modified_base 1787: mod_base = OTHER; note = N1-methylpseudouridine
  modified_base 1790: mod_base = OTHER; note = N1-methylpseudouridine
  modified_base 1807: mod_base = OTHER; note = N1-methylpseudouridine
  modified_base 1808: mod_base = OTHER; note = N1-methylpseudouridine
  modified_base 1823: mod_base = OTHER; note = N1-methylpseudouridine
  modified_base 1835: mod_base = OTHER; note = N1-methylpseudouridine
  modified_base 1841: mod_base = OTHER; note = N1-methylpseudouridine
  modified_base 1850: mod_base = OTHER; note = N1-methylpseudouridine
  modified_base 1859: mod_base = OTHER; note = N1-methylpseudouridine
  modified_base 1862: mod_base = OTHER; note = N1-methylpseudouridine
  modified_base 1879: mod_base = OTHER; note = N1-methylpseudouridine
  modified_base 1880: mod_base = OTHER; note = N1-methylpseudouridine
  modified_base 1882: mod_base = OTHER; note = N1-methylpseudouridine
  modified_base 1888: mod_base = OTHER; note = N1-methylpseudouridine
  modified_base 1889: mod_base = OTHER; note = N1-methylpseudouridine
  modified_base 1892: mod_base = OTHER; note = N1-methylpseudouridine
  modified_base 1913: mod_base = OTHER; note = N1-methylpseudouridine
  modified_base 1922: mod_base = OTHER; note = N1-methylpseudouridine
  modified_base 1925: mod_base = OTHER; note = N1-methylpseudouridine
  modified_base 1930: mod_base = OTHER; note = N1-methylpseudouridine
  modified_base 1931: mod_base = OTHER; note = N1-methylpseudouridine
  modified_base 1937: mod_base = OTHER; note = N1-methylpseudouridine
  modified_base 1942: mod_base = OTHER; note = N1-methylpseudouridine
  modified_base 1945: mod_base = OTHER; note = N1-methylpseudouridine
  modified_base 1949: mod_base = OTHER; note = N1-methylpseudouridine
  modified_base 1958: mod_base = OTHER; note = N1-methylpseudouridine
  modified_base 1978: mod_base = OTHER; note = N1-methylpseudouridine
  modified_base 1979: mod_base = OTHER; note = N1-methylpseudouridine
  modified_base 1984: mod_base = OTHER; note = N1-methylpseudouridine
  modified_base 1988: mod_base = OTHER; note = N1-methylpseudouridine
  modified_base 2012: mod_base = OTHER; note = N1-methylpseudouridine
  modified_base 2020: mod_base = OTHER; note = N1-methylpseudouridine
  modified_base 2026: mod_base = OTHER; note = N1-methylpseudouridine
  modified_base 2027: mod_base = OTHER; note = N1-methylpseudouridine
  modified_base 2036: mod_base = OTHER; note = N1-methylpseudouridine
  modified_base 2039: mod_base = OTHER; note = N1-methylpseudouridine
  modified_base 2065: mod_base = OTHER; note = N1-methylpseudouridine
  modified_base 2066: mod_base = OTHER; note = N1-methylpseudouridine
  modified_base 2069: mod_base = OTHER; note = N1-methylpseudouridine
  modified_base 2078: mod_base = OTHER; note = N1-methylpseudouridine
  modified_base 2086: mod_base = OTHER; note = N1-methylpseudouridine
  modified_base 2087: mod_base = OTHER; note = N1-methylpseudouridine
  modified_base 2099: mod_base = OTHER; note = N1-methylpseudouridine
  modified_base 2114: mod_base = OTHER; note = N1-methylpseudouridine
  modified_base 2117: mod_base = OTHER; note = N1-methylpseudouridine
  modified_base 2132: mod_base = OTHER; note = N1-methylpseudouridine
  modified_base 2135: mod_base = OTHER; note = N1-methylpseudouridine
  modified_base 2137: mod_base = OTHER; note = N1-methylpseudouridine
  modified_base 2143: mod_base = OTHER; note = N1-methylpseudouridine
  modified_base 2146: mod_base = OTHER; note = N1-methylpseudouridine
  modified_base 2147: mod_base = OTHER; note = N1-methylpseudouridine
  modified_base 2153: mod_base = OTHER; note = N1-methylpseudouridine
  modified_base 2155: mod_base = OTHER; note = N1-methylpseudouridine
  modified_base 2165: mod_base = OTHER; note = N1-methylpseudouridine
  modified_base 2174: mod_base = OTHER; note = N1-methylpseudouridine
  modified_base 2179: mod_base = OTHER; note = N1-methylpseudouridine
  modified_base 2183: mod_base = OTHER; note = N1-methylpseudouridine
  modified_base 2195: mod_base = OTHER; note = N1-methylpseudouridine
  modified_base 2209: mod_base = OTHER; note = N1-methylpseudouridine
  modified_base 2210: mod_base = OTHER; note = N1-methylpseudouridine
  modified_base 2213: mod_base = OTHER; note = N1-methylpseudouridine
  modified_base 2237: mod_base = OTHER; note = N1-methylpseudouridine
  modified_base 2240: mod_base = OTHER; note = N1-methylpseudouridine
  modified_base 2246: mod_base = OTHER; note = N1-methylpseudouridine
  modified_base 2249: mod_base = OTHER; note = N1-methylpseudouridine
  modified_base 2251: mod_base = OTHER; note = N1-methylpseudouridine
  modified_base 2252: mod_base = OTHER; note = N1-methylpseudouridine
  modified_base 2270: mod_base = OTHER; note = N1-methylpseudouridine
  modified_base 2276: mod_base = OTHER; note = N1-methylpseudouridine
  modified_base 2285: mod_base = OTHER; note = N1-methylpseudouridine
  modified_base 2296: mod_base = OTHER; note = N1-methylpseudouridine
  modified_base 2299: mod_base = OTHER; note = N1-methylpseudouridine
  modified_base 2300: mod_base = OTHER; note = N1-methylpseudouridine
  modified_base 2309: mod_base = OTHER; note = N1-methylpseudouridine
  modified_base 2314: mod_base = OTHER; note = N1-methylpseudouridine
  modified_base 2317: mod_base = OTHER; note = N1-methylpseudouridine
  modified_base 2318: mod_base = OTHER; note = N1-methylpseudouridine
  modified_base 2327: mod_base = OTHER; note = N1-methylpseudouridine
  modified_base 2333: mod_base = OTHER; note = N1-methylpseudouridine
  modified_base 2342: mod_base = OTHER; note = N1-methylpseudouridine
  modified_base 2353: mod_base = OTHER; note = N1-methylpseudouridine
  modified_base 2354: mod_base = OTHER; note = N1-methylpseudouridine
  modified_base 2366: mod_base = OTHER; note = N1-methylpseudouridine
  modified_base 2374: mod_base = OTHER; note = N1-methylpseudouridine
  modified_base 2384: mod_base = OTHER; note = N1-methylpseudouridine
  modified_base 2387: mod_base = OTHER; note = N1-methylpseudouridine
  modified_base 2393: mod_base = OTHER; note = N1-methylpseudouridine
  modified_base 2396: mod_base = OTHER; note = N1-methylpseudouridine
  modified_base 2410: mod_base = OTHER; note = N1-methylpseudouridine
  modified_base 2411: mod_base = OTHER; note = N1-methylpseudouridine
  modified_base 2414: mod_base = OTHER; note = N1-methylpseudouridine
  modified_base 2438: mod_base = OTHER; note = N1-methylpseudouridine
  modified_base 2441: mod_base = OTHER; note = N1-methylpseudouridine
  modified_base 2450: mod_base = OTHER; note = N1-methylpseudouridine
  modified_base 2453: mod_base = OTHER; note = N1-methylpseudouridine
  modified_base 2456: mod_base = OTHER; note = N1-methylpseudouridine
  modified_base 2462: mod_base = OTHER; note = N1-methylpseudouridine
  modified_base 2468: mod_base = OTHER; note = N1-methylpseudouridine
  modified_base 2470: mod_base = OTHER; note = N1-methylpseudouridine
  modified_base 2471: mod_base = OTHER; note = N1-methylpseudouridine
  modified_base 2486: mod_base = OTHER; note = N1-methylpseudouridine
  modified_base 2489: mod_base = OTHER; note = N1-methylpseudouridine
  modified_base 2501: mod_base = OTHER; note = N1-methylpseudouridine
  modified_base 2509: mod_base = OTHER; note = N1-methylpseudouridine
  modified_base 2519: mod_base = OTHER; note = N1-methylpseudouridine
  modified_base 2521: mod_base = OTHER; note = N1-methylpseudouridine
  modified_base 2522: mod_base = OTHER; note = N1-methylpseudouridine
  modified_base 2534: mod_base = OTHER; note = N1-methylpseudouridine
  modified_base 2537: mod_base = OTHER; note = N1-methylpseudouridine
  modified_base 2546: mod_base = OTHER; note = N1-methylpseudouridine
  modified_base 2560: mod_base = OTHER; note = N1-methylpseudouridine
  modified_base 2569: mod_base = OTHER; note = N1-methylpseudouridine
  modified_base 2579: mod_base = OTHER; note = N1-methylpseudouridine
  modified_base 2591: mod_base = OTHER; note = N1-methylpseudouridine
  modified_base 2594: mod_base = OTHER; note = N1-methylpseudouridine
  modified_base 2603: mod_base = OTHER; note = N1-methylpseudouridine
  modified_base 2630: mod_base = OTHER; note = N1-methylpseudouridine
  modified_base 2633: mod_base = OTHER; note = N1-methylpseudouridine
  modified_base 2638: mod_base = OTHER; note = N1-methylpseudouridine
  modified_base 2639: mod_base = OTHER; note = N1-methylpseudouridine
  modified_base 2642: mod_base = OTHER; note = N1-methylpseudouridine
  modified_base 2656: mod_base = OTHER; note = N1-methylpseudouridine
  modified_base 2657: mod_base = OTHER; note = N1-methylpseudouridine
  modified_base 2671: mod_base = OTHER; note = N1-methylpseudouridine
  modified_base 2672: mod_base = OTHER; note = N1-methylpseudouridine
  modified_base 2675: mod_base = OTHER; note = N1-methylpseudouridine
  modified_base 2681: mod_base = OTHER; note = N1-methylpseudouridine
  modified_base 2684: mod_base = OTHER; note = N1-methylpseudouridine
  modified_base 2699: mod_base = OTHER; note = N1-methylpseudouridine
  modified_base 2704: mod_base = OTHER; note = N1-methylpseudouridine
  modified_base 2705: mod_base = OTHER; note = N1-methylpseudouridine
  modified_base 2717: mod_base = OTHER; note = N1-methylpseudouridine
  modified_base 2732: mod_base = OTHER; note = N1-methylpseudouridine
  modified_base 2753: mod_base = OTHER; note = N1-methylpseudouridine
  modified_base 2765: mod_base = OTHER; note = N1-methylpseudouridine
  modified_base 2774: mod_base = OTHER; note = N1-methylpseudouridine
  modified_base 2792: mod_base = OTHER; note = N1-methylpseudouridine
  modified_base 2804: mod_base = OTHER; note = N1-methylpseudouridine
  modified_base 2807: mod_base = OTHER; note = N1-methylpseudouridine
  modified_base 2816: mod_base = OTHER; note = N1-methylpseudouridine
  modified_base 2822: mod_base = OTHER; note = N1-methylpseudouridine
  modified_base 2825: mod_base = OTHER; note = N1-methylpseudouridine
  modified_base 2834: mod_base = OTHER; note = N1-methylpseudouridine
  modified_base 2837: mod_base = OTHER; note = N1-methylpseudouridine
  modified_base 2843: mod_base = OTHER; note = N1-methylpseudouridine
  modified_base 2846: mod_base = OTHER; note = N1-methylpseudouridine
  modified_base 2870: mod_base = OTHER; note = N1-methylpseudouridine
  modified_base 2873: mod_base = OTHER; note = N1-methylpseudouridine
  modified_base 2876: mod_base = OTHER; note = N1-methylpseudouridine
  modified_base 2882: mod_base = OTHER; note = N1-methylpseudouridine
  modified_base 2936: mod_base = OTHER; note = N1-methylpseudouridine
  modified_base 2945: mod_base = OTHER; note = N1-methylpseudouridine
  modified_base 2957: mod_base = OTHER; note = N1-methylpseudouridine
  modified_base 2966: mod_base = OTHER; note = N1-methylpseudouridine
  modified_base 2978: mod_base = OTHER; note = N1-methylpseudouridine
  modified_base 2981: mod_base = OTHER; note = N1-methylpseudouridine
  modified_base 2996: mod_base = OTHER; note = N1-methylpseudouridine
  modified_base 3011: mod_base = OTHER; note = N1-methylpseudouridine
  modified_base 3026: mod_base = OTHER; note = N1-methylpseudouridine
  modified_base 3028: mod_base = OTHER; note = N1-methylpseudouridine
  modified_base 3032: mod_base = OTHER; note = N1-methylpseudouridine
  modified_base 3034: mod_base = OTHER; note = N1-methylpseudouridine
  modified_base 3037: mod_base = OTHER; note = N1-methylpseudouridine
  modified_base 3041: mod_base = OTHER; note = N1-methylpseudouridine
  modified_base 3059: mod_base = OTHER; note = N1-methylpseudouridine
  modified_base 3061: mod_base = OTHER; note = N1-methylpseudouridine
  modified_base 3065: mod_base = OTHER; note = N1-methylpseudouridine
  modified_base 3077: mod_base = OTHER; note = N1-methylpseudouridine
  modified_base 3083: mod_base = OTHER; note = N1-methylpseudouridine
  modified_base 3092: mod_base = OTHER; note = N1-methylpseudouridine
  modified_base 3100: mod_base = OTHER; note = N1-methylpseudouridine
  modified_base 3107: mod_base = OTHER; note = N1-methylpseudouridine
  modified_base 3116: mod_base = OTHER; note = N1-methylpseudouridine
  modified_base 3119: mod_base = OTHER; note = N1-methylpseudouridine
  modified_base 3130: mod_base = OTHER; note = N1-methylpseudouridine
  modified_base 3131: mod_base = OTHER; note = N1-methylpseudouridine
  modified_base 3134: mod_base = OTHER; note = N1-methylpseudouridine
  modified_base 3149: mod_base = OTHER; note = N1-methylpseudouridine
  modified_base 3161: mod_base = OTHER; note = N1-methylpseudouridine
  modified_base 3164: mod_base = OTHER; note = N1-methylpseudouridine
  modified_base 3203: mod_base = OTHER; note = N1-methylpseudouridine
  modified_base 3218: mod_base = OTHER; note = N1-methylpseudouridine
  modified_base 3221: mod_base = OTHER; note = N1-methylpseudouridine
  modified_base 3230: mod_base = OTHER; note = N1-methylpseudouridine
  modified_base 3238: mod_base = OTHER; note = N1-methylpseudouridine
  modified_base 3241: mod_base = OTHER; note = N1-methylpseudouridine
  modified_base 3251: mod_base = OTHER; note = N1-methylpseudouridine
  modified_base 3254: mod_base = OTHER; note = N1-methylpseudouridine
  modified_base 3266: mod_base = OTHER; note = N1-methylpseudouridine
  modified_base 3269: mod_base = OTHER; note = N1-methylpseudouridine
  modified_base 3283: mod_base = OTHER; note = N1-methylpseudouridine
  modified_base 3284: mod_base = OTHER; note = N1-methylpseudouridine
  modified_base 3293: mod_base = OTHER; note = N1-methylpseudouridine
  modified_base 3317: mod_base = OTHER; note = N1-methylpseudouridine
  modified_base 3326: mod_base = OTHER; note = N1-methylpseudouridine
  modified_base 3340: mod_base = OTHER; note = N1-methylpseudouridine
  modified_base 3341: mod_base = OTHER; note = N1-methylpseudouridine
  modified_base 3344: mod_base = OTHER; note = N1-methylpseudouridine
  modified_base 3356: mod_base = OTHER; note = N1-methylpseudouridine
  modified_base 3359: mod_base = OTHER; note = N1-methylpseudouridine
  modified_base 3374: mod_base = OTHER; note = N1-methylpseudouridine
  modified_base 3386: mod_base = OTHER; note = N1-methylpseudouridine
  modified_base 3395: mod_base = OTHER; note = N1-methylpseudouridine
  modified_base 3398: mod_base = OTHER; note = N1-methylpseudouridine
  modified_base 3410: mod_base = OTHER; note = N1-methylpseudouridine
  modified_base 3421: mod_base = OTHER; note = N1-methylpseudouridine
  modified_base 3440: mod_base = OTHER; note = N1-methylpseudouridine
  modified_base 3443: mod_base = OTHER; note = N1-methylpseudouridine
  modified_base 3452: mod_base = OTHER; note = N1-methylpseudouridine
  modified_base 3458: mod_base = OTHER; note = N1-methylpseudouridine
  modified_base 3461: mod_base = OTHER; note = N1-methylpseudouridine
  modified_base 3467: mod_base = OTHER; note = N1-methylpseudouridine
  modified_base 3479: mod_base = OTHER; note = N1-methylpseudouridine
  modified_base 3482: mod_base = OTHER; note = N1-methylpseudouridine
  modified_base 3490: mod_base = OTHER; note = N1-methylpseudouridine
  modified_base 3491: mod_base = OTHER; note = N1-methylpseudouridine
  modified_base 3502: mod_base = OTHER; note = N1-methylpseudouridine
  modified_base 3503: mod_base = OTHER; note = N1-methylpseudouridine
  modified_base 3508: mod_base = OTHER; note = N1-methylpseudouridine
  modified_base 3509: mod_base = OTHER; note = N1-methylpseudouridine
  modified_base 3511: mod_base = OTHER; note = N1-methylpseudouridine
  modified_base 3518: mod_base = OTHER; note = N1-methylpseudouridine
  modified_base 3527: mod_base = OTHER; note = N1-methylpseudouridine
  modified_base 3535: mod_base = OTHER; note = N1-methylpseudouridine
  modified_base 3556: mod_base = OTHER; note = N1-methylpseudouridine
  modified_base 3560: mod_base = OTHER; note = N1-methylpseudouridine
  modified_base 3569: mod_base = OTHER; note = N1-methylpseudouridine
  modified_base 3572: mod_base = OTHER; note = N1-methylpseudouridine
  modified_base 3584: mod_base = OTHER; note = N1-methylpseudouridine
  modified_base 3587: mod_base = OTHER; note = N1-methylpseudouridine
  modified_base 3595: mod_base = OTHER; note = N1-methylpseudouridine
  modified_base 3605: mod_base = OTHER; note = N1-methylpseudouridine
  modified_base 3616: mod_base = OTHER; note = N1-methylpseudouridine
  modified_base 3617: mod_base = OTHER; note = N1-methylpseudouridine
  modified_base 3620: mod_base = OTHER; note = N1-methylpseudouridine
  modified_base 3622: mod_base = OTHER; note = N1-methylpseudouridine
  modified_base 3631: mod_base = OTHER; note = N1-methylpseudouridine
  modified_base 3638: mod_base = OTHER; note = N1-methylpseudouridine
  modified_base 3640: mod_base = OTHER; note = N1-methylpseudouridine
  modified_base 3647: mod_base = OTHER; note = N1-methylpseudouridine
  modified_base 3656: mod_base = OTHER; note = N1-methylpseudouridine
  modified_base 3659: mod_base = OTHER; note = N1-methylpseudouridine
  modified_base 3680: mod_base = OTHER; note = N1-methylpseudouridine
  modified_base 3700: mod_base = OTHER; note = N1-methylpseudouridine
  modified_base 3703: mod_base = OTHER; note = N1-methylpseudouridine
  modified_base 3704: mod_base = OTHER; note = N1-methylpseudouridine
  modified_base 3706: mod_base = OTHER; note = N1-methylpseudouridine
  modified_base 3707: mod_base = OTHER; note = N1-methylpseudouridine
  modified_base 3709: mod_base = OTHER; note = N1-methylpseudouridine
  modified_base 3719: mod_base = OTHER; note = N1-methylpseudouridine
  modified_base 3722: mod_base = OTHER; note = N1-methylpseudouridine
  modified_base 3727: mod_base = OTHER; note = N1-methylpseudouridine
  modified_base 3728: mod_base = OTHER; note = N1-methylpseudouridine
  modified_base 3730: mod_base = OTHER; note = N1-methylpseudouridine
  modified_base 3731: mod_base = OTHER; note = N1-methylpseudouridine
  modified_base 3743: mod_base = OTHER; note = N1-methylpseudouridine
  modified_base 3749: mod_base = OTHER; note = N1-methylpseudouridine
  modified_base 3764: mod_base = OTHER; note = N1-methylpseudouridine
  modified_base 3779: mod_base = OTHER; note = N1-methylpseudouridine
  modified_base 3782: mod_base = OTHER; note = N1-methylpseudouridine
  modified_base 3809: mod_base = OTHER; note = N1-methylpseudouridine
  modified_base 3812: mod_base = OTHER; note = N1-methylpseudouridine
  modified_base 3814: mod_base = OTHER; note = N1-methylpseudouridine
  modified_base 3832: mod_base = OTHER; note = N1-methylpseudouridine
  modified_base 3833: mod_base = OTHER; note = N1-methylpseudouridine
  modified_base 3842: mod_base = OTHER; note = N1-methylpseudouridine
  modified_base 3851: mod_base = OTHER; note = N1-methylpseudouridine
  modified_base 3854: mod_base = OTHER; note = N1-methylpseudouridine
  modified_base 3860: mod_base = OTHER; note = N1-methylpseudouridine
  modified_base 3869: mod_base = OTHER; note = N1-methylpseudouridine
  modified_base 3875: mod_base = OTHER; note = N1-methylpseudouridine
  modified_base 3878: mod_base = OTHER; note = N1-methylpseudouridine
  modified_base 3893: mod_base = OTHER; note = N1-methylpseudouridine
  modified_base 3907: mod_base = OTHER; note = N1-methylpseudouridine
  modified_base 3908: mod_base = OTHER; note = N1-methylpseudouridine
  modified_base 3923: mod_base = OTHER; note = N1-methylpseudouridine
  modified_base 3926: mod_base = OTHER; note = N1-methylpseudouridine
  modified_base 3950: mod_base = OTHER; note = N1-methylpseudouridine
  modified_base 3953: mod_base = OTHER; note = N1-methylpseudouridine
  modified_base 3970: mod_base = OTHER; note = N1-methylpseudouridine
  modified_base 3985: mod_base = OTHER; note = N1-methylpseudouridine
  modified_base 3994: mod_base = OTHER; note = N1-methylpseudouridine
  modified_base 3995: mod_base = OTHER; note = N1-methylpseudouridine
  modified_base 4010: mod_base = OTHER; note = N1-methylpseudouridine
  modified_base 4015: mod_base = OTHER; note = N1-methylpseudouridine
  modified_base 4022: mod_base = OTHER; note = N1-methylpseudouridine
  modified_base 4025: mod_base = OTHER; note = N1-methylpseudouridine
  modified_base 4028: mod_base = OTHER; note = N1-methylpseudouridine
  modified_base 4031: mod_base = OTHER; note = N1-methylpseudouridine
  modified_base 4040: mod_base = OTHER; note = N1-methylpseudouridine
  modified_base 4064: mod_base = OTHER; note = N1-methylpseudouridine
  modified_base 4073: mod_base = OTHER; note = N1-methylpseudouridine
  modified_base 4082: mod_base = OTHER; note = N1-methylpseudouridine
  modified_base 4085: mod_base = OTHER; note = N1-methylpseudouridine
  modified_base 4091: mod_base = OTHER; note = N1-methylpseudouridine
  modified_base 4097: mod_base = OTHER; note = N1-methylpseudouridine
  modified_base 4100: mod_base = OTHER; note = N1-methylpseudouridine
  modified_base 4114: mod_base = OTHER; note = N1-methylpseudouridine
  modified_base 4115: mod_base = OTHER; note = N1-methylpseudouridine
  modified_base 4130: mod_base = OTHER; note = N1-methylpseudouridine
  modified_base 4135: mod_base = OTHER; note = N1-methylpseudouridine
  modified_base 4136: mod_base = OTHER; note = N1-methylpseudouridine
  modified_base 4139: mod_base = OTHER; note = N1-methylpseudouridine
  modified_base 4153: mod_base = OTHER; note = N1-methylpseudouridine
  modified_base 4163: mod_base = OTHER; note = N1-methylpseudouridine
  modified_base 4175: mod_base = OTHER; note = N1-methylpseudouridine
  modified_base 4178: mod_base = OTHER; note = N1-methylpseudouridine
  modified_base 4181: mod_base = OTHER; note = N1-methylpseudouridine
  modified_base 4187: mod_base = OTHER; note = N1-methylpseudouridine
  modified_base 4195: mod_base = OTHER; note = N1-methylpseudouridine
  modified_base 4202: mod_base = OTHER; note = N1-methylpseudouridine
  modified_base 4204: mod_base = OTHER; note = N1-methylpseudouridine
  modified_base 4205: mod_base = OTHER; note = N1-methylpseudouridine
  modified_base 4211: mod_base = OTHER; note = N1-methylpseudouridine
  modified_base 4232: mod_base = OTHER; note = N1-methylpseudouridine
  modified_base 4235: mod_base = OTHER; note = N1-methylpseudouridine
  modified_base 4253: mod_base = OTHER; note = N1-methylpseudouridine
  modified_base 4271: mod_base = OTHER; note = N1-methylpseudouridine
  modified_base 4277: mod_base = OTHER; note = N1-methylpseudouridine
  modified_base 4288: mod_base = OTHER; note = N1-methylpseudouridine
  modified_base 4292: mod_base = OTHER; note = N1-methylpseudouridine
  modified_base 4297: mod_base = OTHER; note = N1-methylpseudouridine
  modified_base 4298: mod_base = OTHER; note = N1-methylpseudouridine
  modified_base 4301: mod_base = OTHER; note = N1-methylpseudouridine
  modified_base 4303: mod_base = OTHER; note = N1-methylpseudouridine
  modified_base 4307: mod_base = OTHER; note = N1-methylpseudouridine
  modified_base 4318: mod_base = OTHER; note = N1-methylpseudouridine
  modified_base 4328: mod_base = OTHER; note = N1-methylpseudouridine
  modified_base 4364: mod_base = OTHER; note = N1-methylpseudouridine
  modified_base 4366: mod_base = OTHER; note = N1-methylpseudouridine
  modified_base 4367: mod_base = OTHER; note = N1-methylpseudouridine
  modified_base 4370: mod_base = OTHER; note = N1-methylpseudouridine
  modified_base 4387: mod_base = OTHER; note = N1-methylpseudouridine
  modified_base 4391: mod_base = OTHER; note = N1-methylpseudouridine
  modified_base 4400: mod_base = OTHER; note = N1-methylpseudouridine
  modified_base 4403: mod_base = OTHER; note = N1-methylpseudouridine
  modified_base 4412: mod_base = OTHER; note = N1-methylpseudouridine
  modified_base 4420: mod_base = OTHER; note = N1-methylpseudouridine
  modified_base 4421: mod_base = OTHER; note = N1-methylpseudouridine
  modified_base 4433: mod_base = OTHER; note = N1-methylpseudouridine
  modified_base 4436: mod_base = OTHER; note = N1-methylpseudouridine
  modified_base 4439: mod_base = OTHER; note = N1-methylpseudouridine
  modified_base 4454: mod_base = OTHER; note = N1-methylpseudouridine
  modified_base 4463: mod_base = OTHER; note = N1-methylpseudouridine
  modified_base 4466: mod_base = OTHER; note = N1-methylpseudouridine
  modified_base 4474: mod_base = OTHER; note = N1-methylpseudouridine
  modified_base 4499: mod_base = OTHER; note = N1-methylpseudouridine
  modified_base 4520: mod_base = OTHER; note = N1-methylpseudouridine
  modified_base 4523: mod_base = OTHER; note = N1-methylpseudouridine
  modified_base 4529: mod_base = OTHER; note = N1-methylpseudouridine
  modified_base 4531: mod_base = OTHER; note = N1-methylpseudouridine
  modified_base 4532: mod_base = OTHER; note = N1-methylpseudouridine
  modified_base 4538: mod_base = OTHER; note = N1-methylpseudouridine
  modified_base 4547: mod_base = OTHER; note = N1-methylpseudouridine
  modified_base 4564: mod_base = OTHER; note = N1-methylpseudouridine
  modified_base 4565: mod_base = OTHER; note = N1-methylpseudouridine
  modified_base 4570: mod_base = OTHER; note = N1-methylpseudouridine
  modified_base 4573: mod_base = OTHER; note = N1-methylpseudouridine
  modified_base 4574: mod_base = OTHER; note = N1-methylpseudouridine
  modified_base 4586: mod_base = OTHER; note = N1-methylpseudouridine
  modified_base 4600: mod_base = OTHER; note = N1-methylpseudouridine
  modified_base 4619: mod_base = OTHER; note = N1-methylpseudouridine
  modified_base 4622: mod_base = OTHER; note = N1-methylpseudouridine
  modified_base 4634: mod_base = OTHER; note = N1-methylpseudouridine
  modified_base 4637: mod_base = OTHER; note = N1-methylpseudouridine
  modified_base 4649: mod_base = OTHER; note = N1-methylpseudouridine
  modified_base 4658: mod_base = OTHER; note = N1-methylpseudouridine
  modified_base 4660: mod_base = OTHER; note = N1-methylpseudouridine
  modified_base 4673: mod_base = OTHER; note = N1-methylpseudouridine
  modified_base 4679: mod_base = OTHER; note = N1-methylpseudouridine
  modified_base 4688: mod_base = OTHER; note = N1-methylpseudouridine
  modified_base 4735: mod_base = OTHER; note = N1-methylpseudouridine
  modified_base 4736: mod_base = OTHER; note = N1-methylpseudouridine
  modified_base 4763: mod_base = OTHER; note = N1-methylpseudouridine
  modified_base 4765: mod_base = OTHER; note = N1-methylpseudouridine
atgagcgaggtggagttcagccacgagtactggatgcggcacgccctgaccctggccaagcgggcccgggacgagcgggaggtgcccgtgggcgccgtgctggtgctgaacaaccgggtgatcggcgagggctggaaccgggccatcggcctgcacgaccccaccgcccacgccgagatcatggccctgcggcagggcggcctggtgatgcagaactaccggctgatcgacgccaccctgtacgtgaccttcgagccctgcgtgatgtgcgccggcgccatgatccacagccggatcggccgggtggtgttcggcgtgcggaacgccaagaccggcgccgccggcagcctgatggacgtgctgcaccaccccggcatgaaccaccgggtggagatcaccgagggcatcctggccgacgagtgcgccgccctgctgtgccggttcttccggatgccccggcgggtgttcaacgcccagaagaaggcccagagcagcaccgacagcggcggcagcagcggcggcagcagcggcagcgagacacccggcaccagcgagagcgccacccccgagagcagcggcggcagcagcggcggcagcgacaagaagtacagcatcggcctggccatcggcaccaacagcgtgggctgggccgtgatcaccgacgagtacaaggtgcccagcaagaagttcaaggtgctgggcaacaccgaccggcacagcatcaagaagaacctgatcggcgccctgctgttcgacagcggcgagacagccgaggccacccggctgaagcggaccgcccggcggcggtacacccggcggaagaaccggatctgctacctgcaggagatcttcagcaacgagatggccaaggtggacgacagcttcttccaccggctggaggagagcttcctggtggaggaggacaagaagcacgagcggcaccccatcttcggcaacatcgtggacgaggtggcctaccacgagaagtaccccaccatctaccacctgcggaagaagctggtggacagcaccgacaaggccgacctgcggctgatctacctggccctggcccacatgatcaagttccggggccacttcctgatcgagggcgacctgaaccccgacaacagcgacgtggacaagctgttcatccagctggtgcagacctacaaccagctgttcgaggagaaccccatcaacgccagcggcgtggacgccaaggccatcctgagcgcccggctgagcaagagccggcggctggagaacctgatcgcccagctgcccggcgagaagaagaacggcctgttcggcaacctgatcgccctgagcctgggcctgacccccaacttcaagagcaacttcgacctggccgaggacgccaagctgcagctgagcaaggacacctacgacgacgacctggacaacctgctggcccagatcggcgaccagtacgccgacctgttcctggccgccaagaacctgagcgacgccatcctgctgagcgacatcctgcgggtgaacaccgagatcaccaaggcccccctgagcgccagcatgatcaagcggtacgacgagcaccaccaggacctgaccctgctgaaggccctggtgcggcagcagctgcccgagaagtacaaggagatcttcttcgaccagagcaagaacggctacgccggctacatcgacggcggcgccagccaggaggagttctacaagttcatcaagcccatcctggagaagatggacggcaccgaggagctgctggtgaagctgaaccgggaggacctgctgcggaagcagcggaccttcgacaacggcagcatcccccaccagatccacctgggcgagctgcacgccatcctgcggcggcaggaggacttctaccccttcctgaaggacaaccgggagaagatcgagaagatcctgaccttccggatcccctactacgtgggccccctggcccggggcaacagccggttcgcctggatgacccgcaagagcgaggagacaatcaccccctggaacttcgaggaggtggtggacaagggcgccagcgcccagagcttcatcgagcggatgaccaacttcgacaagaacctgcccaacgagaaggtgctgcccaagcacagcctgctgtacgagtacttcaccgtgtacaacgagctgaccaaggtgaagtacgtgaccgagggcatgcggaagcccgccttcctgagcggcgagcagaagaaggccatcgtggacctgctgttcaagaccaaccggaaggtgaccgtgaagcagctgaaggaggactacttcaagaagatcgagtgcttcgacagcgtggagatcagcggcgtggaggaccggttcaacgccagcctgggcacctaccacgacctgctgaagatcatcaaggacaaggacttcctggacaacgaggagaacgaggacatcctggaggacatcgtgctgaccctgaccctgttcgaggaccgggagatgatcgaggagcggctgaagacctacgcccacctgttcgacgacaaggtgatgaagcagctgaagcggcggcggtacaccggctggggccggctgagccggaagctgatcaacggcatccgggacaagcagagcggcaagaccatcctggacttcctcaagagcgacggcttcgccaaccggaacttcatgcagctgatccacgacgacagcctgaccttcaaggaggacatccagaaggcccaggtgagcggccagggcgacagcctgcacgagcacatcgccaacctggccggcagccccgccatcaagaagggcatcctgcagaccgtgaaggtggtggacgagctggtgaaggtgatgggccggcacaagcccgagaacatcgtgatcgagatggcccgggagaaccagaccacccagaagggccagaagaacagccgggagcggatgaagcggatcgaggagggcatcaaggagctgggcagccagatcctgaaggagcaccccgtggagaacacccagctgcagaacgagaagctgtacctgtactacctgcagaacggccgggacatgtacgtggaccaggagctggacatcaaccggctgagcgactacgacgtggaccacatcgtgccccagagcttcctgaaggacgacagcatcgacaacgccgtgctgacccggagcgacaagaaccggggcaagagcgacaacgtgcccagcgaggaggtggtgaagaagatgaagaactactggcggcagctgctgaacgccaagctgatcacccagcggaagttcgacaacctgaccaaggccgagcggggcggcctgagcgagctggacaaggccggcttcatcaagcggcagctggtggagacacggcagatcaccaagcacgtggcccagatcctggacagccggatgaacaccaagtacgacgagaacgacaagctgatccgggaggtgaaggtgatcaccctcaagagcaagctggtgagcgacttccggaaggacttccagttctacaaggtgcgggagatcaacaactaccaccacgcccacgacgcctacctgaacgccgtggtgggcaccgccctgatcaagaagtaccccaagctggagagcgagttcgtgtacggcgactacaaggtgtacgacgtgcggaagatgatcgccaagagcgagcaggagatcggcaaggccaccgccaagtacttcttctacagcaacatcatgaacttcttcaagaccgagatcaccctggccaacggcgagatccggaagcggcccctgatcgagacaaacggcgagacaggcgagatcgtgtgggacaagggccgggacttcgccaccgtgcggaaggtgctgagcatgccccaggtgaacatcgtgaagaagaccgaggtgcagaccggcggcttcagcaaggagagcatcctgcccaagcggaacagcgacaagctgatcgcccggaagaaggactgggaccccaagaagtacggcggcttcgacagccccaccgtggcctacagcgtgctggtggtggccaaggtggagaagggcaagagcaagaagctcaagagcgtgaaggagctgctgggcatcaccatcatggagcggagcagcttcgagaagaaccccatcgacttcctggaggccaagggctacaaggaggtgaagaaggacctgatcatcaagctgcccaagtacagcctgttcgagctggagaacggccggaagcggatgctggccagcgccggcgagctgcagaagggcaacgagctggccctgcccagcaagtacgtgaacttcctgtacctggccagccactacgagaagctgaagggcagccccgaggacaacgagcagaagcagctgttcgtggagcagcacaagcactacctggacgagatcatcgagcagatcagcgagttcagcaagcgggtgatcctggccgacgccaacctggacaaggtgctgagcgcctacaacaagcaccgggacaagcccatccgggagcaggccgagaacatcatccacctgttcaccctgaccaacctgggcgcccccgccgccttcaagtacttcgacaccaccatcgaccggaagcggtacaccagcaccaaggaggtgctggacgccaccctgatccaccagagcatcaccggcctgtacgagacacggatcgacctgagccagctgggcggcgacgagggcgccgacaagcggaccgccgacggcagcgagttcgagagccccaagaagaagcggaaggtgtga

SEQ ID NO: 726 - protein, 1588 aa, synthetic construct
MSEVEFSHEYWMRHALTLAKRARDEREVPVGAVLVLNNRVIGEGWNRAIGLHDPTAHAEIMALRQGGLVMQNYRLIDATLYVTFEPCVMCAGAMIHSRIGRVVFGVRNAKTGAAGSLMDVLHHPGMNHRVEITEGILADECAALLCRFFRMPRRVFNAQKKAQSSTDSGGSSGGSSGSETPGTSESATPESSGGSSGGSDKKYSIGLAIGTNSVGWAVITDEYKVPSKKFKVLGNTDRHSIKKNLIGALLFDSGETAEATRLKRTARRRYTRRKNRICYLQEIFSNEMAKVDDSFFHRLEESFLVEEDKKHERHPIFGNIVDEVAYHEKYPTIYHLRKKLVDSTDKADLRLIYLALAHMIKFRGHFLIEGDLNPDNSDVDKLFIQLVQTYNQLFEENPINASGVDAKAILSARLSKSRRLENLIAQLPGEKKNGLFGNLIALSLGLTPNFKSNFDLAEDAKLQLSKDTYDDDLDNLLAQIGDQYADLFLAAKNLSDAILLSDILRVNTEITKAPLSASMIKRYDEHHQDLTLLKALVRQQLPEKYKEIFFDQSKNGYAGYIDGGASQEEFYKFIKPILEKMDGTEELLVKLNREDLLRKQRTFDNGSIPHQIHLGELHAILRRQEDFYPFLKDNREKIEKILTFRIPYYVGPLARGNSRFAWMTRKSEETITPWNFEEVVDKGASAQSFIERMTNFDKNLPNEKVLPKHSLLYEYFTVYNELTKVKYVTEGMRKPAFLSGEQKKAIVDLLFKTNRKVTVKQLKEDYFKKIECFDSVEISGVEDRFNASLGTYHDLLKIIKDKDFLDNEENEDILEDIVLTLTLFEDREMIEERLKTYAHLFDDKVMKQLKRRRYTGWGRLSRKLINGIRDKQSGKTILDFLKSDGFANRNFMQLIHDDSLTFKEDIQKAQVSGQGDSLHEHIANLAGSPAIKKGILQTVKVVDELVKVMGRHKPENIVIEMARENQTTQKGQKNSRERMKRIEEGIKELGSQILKEHPVENTQLQNEKLYLYYLQNGRDMYVDQELDINRLSDYDVDHIVPQSFLKDDSIDNAVLTRSDKNRGKSDNVPSEEVVKKMKNYWRQLLNAKLITQRKFDNLTKAERGGLSELDKAGFIKRQLVETRQITKHVAQILDSRMNTKYDENDKLIREVKVITLKSKLVSDFRKDFQFYKVREINNYHHAHDAYLNAVVGTALIKKYPKLESEFVYGDYKVYDVRKMIAKSEQEIGKATAKYFFYSNIMNFFKTEITLANGEIRKRPLIETNGETGEIVWDKGRDFATVRKVLSMPQVNIVKKTEVQTGGFSKESILPKRNSDKLIARKKDWDPKKYGGFDSPTVAYSVLVVAKVEKGKSKKLKSVKELLGITIMERSSFEKNPIDFLEAKGYKEVKKDLIIKLPKYSLFELENGRKRMLASAGELQKGNELALPSKYVNFLYLASHYEKLKGSPEDNEQKQLFVEQHKHYLDEIIEQISEFSKRVILADANLDKVLSAYNKHRDKPIREQAENIIHLFTLTNLGAPAAFKYFDTTIDRKRYTSTKEVLDATLIHQSITGLYETRIDLSQLGGDEGADKRTADGSEFESPKKKRKV

SEQ ID NO: 727 - RNA, 4767 nt, synthetic construct
  source 1..4767: mol_type = other RNA
  modified_base 2: mod_base = OTHER; note = N1-methylpseudouridine
  modified_base 11: mod_base = OTHER; note = N1-methylpseudouridine
  modified_base 16: mod_base = OTHER; note = N1-methylpseudouridine
  modified_base 17: mod_base = OTHER; note = N1-methylpseudouridine
  modified_base 28: mod_base = OTHER; note = N1-methylpseudouridine
  modified_base 31: mod_base = OTHER; note = N1-methylpseudouridine
  modified_base 35: mod_base = OTHER; note = N1-methylpseudouridine
  modified_base 47: mod_base = OTHER; note = N1-methylpseudouridine
  modified_base 53: mod_base = OTHER; note = N1-methylpseudouridine
  modified_base 83: mod_base = OTHER; note = N1-methylpseudouridine
  modified_base 89: mod_base = OTHER; note = N1-methylpseudouridine
  modified_base 98: mod_base = OTHER; note = N1-methylpseudouridine
  modified_base 101: mod_base = OTHER; note = N1-methylpseudouridine
  modified_base 104: mod_base = OTHER; note = N1-methylpseudouridine
  modified_base 107: mod_base = OTHER; note = N1-methylpseudouridine
  modified_base 119: mod_base = OTHER; note = N1-methylpseudouridine
  modified_base 122: mod_base = OTHER; note = N1-methylpseudouridine
  modified_base 133: mod_base = OTHER; note = N1-methylpseudouridine
  modified_base 146: mod_base = OTHER; note = N1-methylpseudouridine
  modified_base 152: mod_base = OTHER; note = N1-methylpseudouridine
  modified_base 179: mod_base = OTHER; note = N1-methylpseudouridine
  modified_base 182: mod_base = OTHER; note = N1-methylpseudouridine
  modified_base 188: mod_base = OTHER; note = N1-methylpseudouridine
  modified_base 203: mod_base = OTHER; note = N1-methylpseudouridine
  modified_base 206: mod_base = OTHER; note = N1-methylpseudouridine
  modified_base 209: mod_base = OTHER; note = N1-methylpseudouridine
  modified_base 217: mod_base = OTHER; note = N1-methylpseudouridine
  modified_base 224: mod_base = OTHER; note = N1-methylpseudouridine
  modified_base 227: mod_base = OTHER; note = N1-methylpseudouridine
  modified_base 239: mod_base = OTHER; note = N1-methylpseudouridine
  modified_base 241: mod_base = OTHER; note = N1-methylpseudouridine
  modified_base 245: mod_base = OTHER; note = N1-methylpseudouridine
  modified_base 250: mod_base = OTHER; note = N1-methylpseudouridine
  modified_base 251: mod_base = OTHER; note = N1-methylpseudouridine
  modified_base 259: mod_base = OTHER; note = N1-methylpseudouridine
  modified_base 263: mod_base = OTHER; note = N1-methylpseudouridine
  modified_base 266: mod_base = OTHER; note = N1-methylpseudouridine
  modified_base 268: mod_base = OTHER; note = N1-methylpseudouridine
  modified_base 281: mod_base = OTHER; note = N1-methylpseudouridine
  modified_base 284: mod_base = OTHER; note = N1-methylpseudouridine
  modified_base 296: mod_base = OTHER; note = N1-methylpseudouridine
  modified_base 305: mod_base = OTHER; note = N1-methylpseudouridine
  modified_base 308: mod_base = OTHER; note = N1-methylpseudouridine
  modified_base 310: mod_base = OTHER; note = N1-methylpseudouridine
  modified_base 311: mod_base = OTHER; note = N1-methylpseudouridine
  modified_base 317: mod_base = OTHER; note = N1-methylpseudouridine
  modified_base 350: mod_base = OTHER; note = N1-methylpseudouridine
  modified_base 353: mod_base = OTHER; note = N1-methylpseudouridine
  modified_base 359: mod_base = OTHER; note = N1-methylpseudouridine
  modified_base 362: mod_base = OTHER; note = N1-methylpseudouridine
  modified_base 377: mod_base = OTHER; note = N1-methylpseudouridine
  modified_base 389: mod_base = OTHER; note = N1-methylpseudouridine
  modified_base 395: mod_base = OTHER; note = N1-methylpseudouridine
  modified_base 407: mod_base = OTHER; note = N1-methylpseudouridine
  modified_base 410: mod_base = OTHER; note = N1-methylpseudouridine
  modified_base 421: mod_base = OTHER; note = N1-methylpseudouridine
  modified_base 431: mod_base = OTHER; note = N1-methylpseudouridine
  modified_base 434: mod_base = OTHER; note = N1-methylpseudouridine
  modified_base 436: mod_base = OTHER; note = N1-methylpseudouridine
  modified_base 442: mod_base = OTHER; note = N1-methylpseudouridine
  modified_base 443: mod_base = OTHER; note = N1-methylpseudouridine
  modified_base 445: mod_base = OTHER; note = N1-methylpseudouridine
  modified_base 446: mod_base = OTHER; note = N1-methylpseudouridine
  modified_base 452: mod_base = OTHER; note = N1-methylpseudouridine
  modified_base 464: mod_base = OTHER; note = N1-methylpseudouridine
  modified_base 466: mod_base = OTHER; note = N1-methylpseudouridine
  modified_base 467: mod_base = OTHER; note = N1-methylpseudouridine
  modified_base 607: mod_base = OTHER; note = N1-methylpseudouridine
  modified_base 614: mod_base = OTHER; note = N1-methylpseudouridine
  modified_base 620: mod_base = OTHER; note = N1-methylpseudouridine
  modified_base 626: mod_base = OTHER; note = N1-methylpseudouridine
  modified_base 641: mod_base = OTHER; note = N1-methylpseudouridine
  modified_base 646: mod_base = OTHER; note = N1-methylpseudouridine
  modified_base 653: mod_base = OTHER; note = N1-methylpseudouridine
  modified_base 656: mod_base = OTHER; note = N1-methylpseudouridine
  modified_base 667: mod_base = OTHER; note = N1-methylpseudouridine
  modified_base 674: mod_base = OTHER; note = N1-methylpseudouridine
  modified_base 688: mod_base = OTHER; note = N1-methylpseudouridine
  modified_base 689: mod_base = OTHER; note = N1-methylpseudouridine
  modified_base 695: mod_base = OTHER; note = N1-methylpseudouridine
  modified_base 698: mod_base = OTHER; note = N1-methylpseudouridine
  modified_base 722: mod_base = OTHER; note = N1-methylpseudouridine
  modified_base 734: mod_base = OTHER; note = N1-methylpseudouridine
  modified_base 737: mod_base = OTHER; note = N1-methylpseudouridine
  modified_base 746: mod_base = OTHER; note = N1-methylpseudouridine
  modified_base 749: mod_base = OTHER; note = N1-methylpseudouridine
  modified_base 751: mod_base = OTHER; note = N1-methylpseudouridine
  modified_base 752: mod_base = OTHER; note = N1-methylpseudouridine
  modified_base 785: mod_base = OTHER; note = N1-methylpseudouridine
  modified_base 808: mod_base = OTHER; note = N1-methylpseudouridine
  modified_base 830: mod_base = OTHER; note = N1-methylpseudouridine
  modified_base 832: mod_base = OTHER; note = N1-methylpseudouridine
  modified_base 835: mod_base = OTHER; note = N1-methylpseudouridine
  modified_base 839: mod_base = OTHER; note = N1-methylpseudouridine
  modified_base 848: mod_base = OTHER; note = N1-methylpseudouridine
  modified_base 850: mod_base = OTHER; note = N1-methylpseudouridine
  modified_base 851: mod_base = OTHER; note = N1-methylpseudouridine
  modified_base 863: mod_base = OTHER; note = N1-methylpseudouridine
  modified_base 872: mod_base = OTHER; note = N1-methylpseudouridine
  modified_base 883: mod_base = OTHER; note = N1-methylpseudouridine
  modified_base 884: mod_base = OTHER; note = N1-methylpseudouridine
  modified_base 886: mod_base = OTHER; note = N1-methylpseudouridine
  modified_base 887: mod_base = OTHER; note = N1-methylpseudouridine
  modified_base 896: mod_base = OTHER; note = N1-methylpseudouridine
  modified_base 907: mod_base = OTHER; note = N1-methylpseudouridine
  modified_base 908: mod_base = OTHER; note = N1-methylpseudouridine
  modified_base 911: mod_base = OTHER; note = N1-methylpseudouridine
  modified_base 914: mod_base = OTHER; note = N1-methylpseudouridine
  modified_base 947: mod_base = OTHER; note = N1-methylpseudouridine
  modified_base 949: mod_base = OTHER; note = N1-methylpseudouridine
  modified_base 950: mod_base = OTHER; note = N1-methylpseudouridine
  modified_base 959: mod_base = OTHER; note = N1-methylpseudouridine
  modified_base 962: mod_base = OTHER; note = N1-methylpseudouridine
  modified_base 971: mod_base = OTHER; note = N1-methylpseudouridine
  modified_base 976: mod_base = OTHER; note = N1-methylpseudouridine
  modified_base 988: mod_base = OTHER; note = N1-methylpseudouridine
  modified_base 998: mod_base = OTHER; note = N1-methylpseudouridine
  modified_base 1000: mod_base = OTHER; note = N1-methylpseudouridine
  modified_base 1007: mod_base = OTHER; note = N1-methylpseudouridine
  modified_base 1019: mod_base = OTHER; note = N1-methylpseudouridine
  modified_base 1022: mod_base = OTHER; note = N1-methylpseudouridine
  modified_base 1046: mod_base = OTHER; note = N1-methylpseudouridine
  modified_base 1052: mod_base = OTHER; note = N1-methylpseudouridine
  modified_base 1055: mod_base = OTHER; note = N1-methylpseudouridine
  modified_base 1057: mod_base = OTHER; note = N1-methylpseudouridine
  modified_base 1061: mod_base = OTHER; note = N1-methylpseudouridine
  modified_base 1067: mod_base = OTHER; note = N1-methylpseudouridine
  modified_base 1076: mod_base = OTHER; note = N1-methylpseudouridine
  modified_base 1079: mod_base = OTHER; note = N1-methylpseudouridine
  modified_base 1084: mod_base = OTHER; note = N1-methylpseudouridine
  modified_base 1085: mod_base = OTHER; note = N1-methylpseudouridine
  modified_base 1096: mod_base = OTHER; note = N1-methylpseudouridine
  modified_base 1097: mod_base = OTHER; note = N1-methylpseudouridine
  modified_base 1100: mod_base = OTHER; note = N1-methylpseudouridine
  modified_base 1103: mod_base = OTHER; note = N1-methylpseudouridine
  modified_base 1115: mod_base = OTHER; note = N1-methylpseudouridine
  modified_base 1136: mod_base = OTHER; note = N1-methylpseudouridine
  modified_base 1145: mod_base = OTHER; note = N1-methylpseudouridine
  modified_base 1147: mod_base = OTHER; note = N1-methylpseudouridine
  modified_base 1148: mod_base = OTHER; note = N1-methylpseudouridine
  modified_base 1151: mod_base = OTHER; note = N1-methylpseudouridine
  modified_base 1157: mod_base = OTHER; note = N1-methylpseudouridine
  modified_base 1160: mod_base = OTHER; note = N1-methylpseudouridine
  modified_base 1168: mod_base = OTHER; note = N1-methylpseudouridine
  modified_base 1178: mod_base = OTHER; note = N1-methylpseudouridine
  modified_base 1180: mod_base = OTHER; note = N1-methylpseudouridine
  modified_base 1181: mod_base = OTHER; note = N1-methylpseudouridine
  modified_base 1196: mod_base = OTHER; note = N1-methylpseudouridine
  modified_base 1211: mod_base = OTHER; note = N1-methylpseudouridine
  modified_base 1226: mod_base = OTHER; note = N1-methylpseudouridine
  modified_base 1229: mod_base = OTHER; note = N1-methylpseudouridine
  modified_base 1241: mod_base = OTHER; note = N1-methylpseudouridine
  modified_base 1259: mod_base = OTHER; note = N1-methylpseudouridine
  modified_base 1268: mod_base = OTHER; note = N1-methylpseudouridine
  modified_base 1271: mod_base = OTHER; note = N1-methylpseudouridine
  modified_base 1280: mod_base = OTHER; note = N1-methylpseudouridine
  modified_base 1304: mod_base = OTHER; note = N1-methylpseudouridine
  modified_base 1306: mod_base = OTHER; note = N1-methylpseudouridine
  modified_base 1307: mod_base = OTHER; note = N1-methylpseudouridine
  modified_base 1316: mod_base = OTHER; note = N1-methylpseudouridine
  modified_base 1319: mod_base = OTHER; note = N1-methylpseudouridine
  modified_base 1325: mod_base = OTHER; note = N1-methylpseudouridine
  modified_base 1331: mod_base = OTHER; note = N1-methylpseudouridine
  modified_base 1337: mod_base = OTHER; note = N1-methylpseudouridine
  modified_base 1348: mod_base = OTHER; note = N1-methylpseudouridine
  modified_base 1349: mod_base = OTHER; note = N1-methylpseudouridine
  modified_base 1360: mod_base = OTHER; note = N1-methylpseudouridine
  modified_base 1361: mod_base = OTHER; note = N1-methylpseudouridine
  modified_base 1367: mod_base = OTHER; note = N1-methylpseudouridine
  modified_base 1385: mod_base = OTHER; note = N1-methylpseudouridine
  modified_base 1391: mod_base = OTHER; note = N1-methylpseudouridine
  modified_base 1405: mod_base = OTHER; note = N1-methylpseudouridine
  modified_base 1418: mod_base = OTHER; note = N1-methylpseudouridine
  modified_base 1427: mod_base = OTHER; note = N1-methylpseudouridine
  modified_base 1430: mod_base = OTHER; note = N1-methylpseudouridine
  modified_base 1439: mod_base = OTHER; note = N1-methylpseudouridine
  modified_base 1450: mod_base = OTHER; note = N1-methylpseudouridine
  modified_base 1460: mod_base = OTHER; note = N1-methylpseudouridine
  modified_base 1462: mod_base = OTHER; note = N1-methylpseudouridine
  modified_base 1463: mod_base = OTHER; note = N1-methylpseudouridine
  modified_base 1466: mod_base = OTHER; note = N1-methylpseudouridine
  modified_base 1481: mod_base = OTHER; note = N1-methylpseudouridine
  modified_base 1493: mod_base = OTHER; note = N1-methylpseudouridine
  modified_base 1496: mod_base = OTHER; note = N1-methylpseudouridine
  modified_base 1499: mod_base = OTHER; note = N1-methylpseudouridine
  modified_base 1508: mod_base = OTHER; note = N1-methylpseudouridine
  modified_base 1511: mod_base = OTHER; note = N1-methylpseudouridine
  modified_base 1517: mod_base = OTHER; note = N1-methylpseudouridine
  modified_base 1529: mod_base = OTHER; note = N1-methylpseudouridine
  modified_base 1544: mod_base = OTHER; note = N1-methylpseudouridine
  modified_base 1556: mod_base = OTHER; note = N1-methylpseudouridine
  modified_base 1559: mod_base = OTHER; note = N1-methylpseudouridine
  modified_base 1567: mod_base = OTHER; note = N1-methylpseudouridine
  modified_base 1589: mod_base = OTHER; note = N1-methylpseudouridine
  modified_base 1595: mod_base = OTHER; note = N1-methylpseudouridine
  modified_base 1598: mod_base = OTHER; note = N1-methylpseudouridine
  modified_base 1607: mod_base = OTHER; note = N1-methylpseudouridine
  modified_base 1610: mod_base = OTHER; note = N1-methylpseudouridine
  modified_base 1622: mod_base = OTHER; note = N1-methylpseudouridine
  modified_base 1633: mod_base = OTHER; note = N1-methylpseudouridine
  modified_base 1643: mod_base = OTHER; note = N1-methylpseudouridine
  modified_base 1645: mod_base = OTHER; note = N1-methylpseudouridine
  modified_base 1646: mod_base = OTHER; note = N1-methylpseudouridine
  modified_base 1648: mod_base = OTHER; note = N1-methylpseudouridine
  modified_base 1649: mod_base = OTHER; note = N1-methylpseudouridine
  modified_base 1669: mod_base = OTHER; note = N1-methylpseudouridine
  modified_base 1678: mod_base = OTHER; note = N1-methylpseudouridine
  modified_base 1682: mod_base = OTHER; note = N1-methylpseudouridine
  modified_base 1708: mod_base = OTHER; note = N1-methylpseudouridine
  modified_base 1709: mod_base = OTHER; note = N1-methylpseudouridine
  modified_base 1711: mod_base = OTHER; note = N1-methylpseudouridine
  modified_base 1717: mod_base = OTHER; note = N1-methylpseudouridine
  modified_base 1718: mod_base = OTHER; note = N1-methylpseudouridine
  modified_base 1721: mod_base = OTHER; note = N1-methylpseudouridine
  modified_base 1730: mod_base = OTHER; note = N1-methylpseudouridine
  modified_base 1733: mod_base = OTHER; note = N1-methylpseudouridine
  modified_base 1742: mod_base = OTHER; note = N1-methylpseudouridine
  modified_base 1760: mod_base = OTHER; note = N1-methylpseudouridine
  modified_base 1763: mod_base = OTHER; note = N1-methylpseudouridine
  modified_base 1766: mod_base = OTHER; note = N1-methylpseudouridine
  modified_base 1772: mod_base = OTHER; note = N1-methylpseudouridine
  modified_base 1787: mod_base = OTHER; note = N1-methylpseudouridine
  modified_base 1790: mod_base = OTHER; note = N1-methylpseudouridine
  modified_base 1807: mod_base = OTHER; note = N1-methylpseudouridine
  modified_base 1808: mod_base = OTHER; note = N1-methylpseudouridine
  modified_base 1823: mod_base = OTHER; note = N1-methylpseudouridine
  modified_base 1835: mod_base = OTHER; note = N1-methylpseudouridine
  modified_base 1841: mod_base = OTHER; note = N1-methylpseudouridine
  modified_base 1850: mod_base = OTHER; note = N1-methylpseudouridine
  modified_base 1859: mod_base = OTHER; note = N1-methylpseudouridine
  modified_base 1862: mod_base = OTHER; note = N1-methylpseudouridine
  modified_base 1879: mod_base = OTHER; note = N1-methylpseudouridine
  modified_base 1880: mod_base = OTHER; note = N1-methylpseudouridine
  modified_base 1882: mod_base = OTHER; note = N1-methylpseudouridine
  modified_base 1888: mod_base = OTHER; note = N1-methylpseudouridine
  modified_base 1889: mod_base = OTHER; note = N1-methylpseudouridine
  modified_base 1892: mod_base = OTHER; note = N1-methylpseudouridine
  modified_base 1913: mod_base = OTHER; note = N1-methylpseudouridine
  modified_base 1922: mod_base = OTHER; note = N1-methylpseudouridine
  modified_base 1925: mod_base = OTHER; note = N1-methylpseudouridine
  modified_base 1930: mod_base = OTHER; note = N1-methylpseudouridine
  modified_base 1931: mod_base = OTHER; note = N1-methylpseudouridine
  modified_base 1937: mod_base = OTHER; note = N1-methylpseudouridine
  modified_base 1942: mod_base = OTHER; note = N1-methylpseudouridine
  modified_base 1945: mod_base = OTHER; note = N1-methylpseudouridine
  modified_base 1949: mod_base = OTHER; note = N1-methylpseudouridine
  modified_base 1958: mod_base = OTHER; note = N1-methylpseudouridine
  modified_base 1978: mod_base = OTHER; note = N1-methylpseudouridine
  modified_base 1979: mod_base = OTHER; note = N1-methylpseudouridine
  modified_base 1984: mod_base = OTHER; note = N1-methylpseudouridine
  modified_base 1988: mod_base = OTHER; note = N1-methylpseudouridine
  modified_base 2012: mod_base = OTHER; note = N1-methylpseudouridine
  modified_base 2020: mod_base = OTHER; note = N1-methylpseudouridine
  modified_base 2026: mod_base = OTHER; note = N1-methylpseudouridine
  modified_base 2027: mod_base = OTHER; note = N1-methylpseudouridine
  modified_base 2036: mod_base = OTHER; note = N1-methylpseudouridine
  modified_base 2039: mod_base = OTHER; note = N1-methylpseudouridine
  modified_base 2065: mod_base = OTHER; note = N1-methylpseudouridine
  modified_base 2066: mod_base = OTHER; note = N1-methylpseudouridine
  modified_base 2069: mod_base = OTHER; note = N1-methylpseudouridine
  modified_base 2078: mod_base = OTHER; note = N1-methylpseudouridine
  modified_base 2086: mod_base = OTHER; note = N1-methylpseudouridine
  modified_base 2087: mod_base = OTHER; note = N1-methylpseudouridine
  modified_base 2099: mod_base = OTHER; note = N1-methylpseudouridine
  modified_base 2114: mod_base = OTHER; note = N1-methylpseudouridine
  modified_base 2117: mod_base = OTHER; note = N1-methylpseudouridine
  modified_base 2132: mod_base = OTHER; note = N1-methylpseudouridine
  modified_base 2135: mod_base = OTHER; note = N1-methylpseudouridine
  modified_base 2137: mod_base = OTHER; note = N1-methylpseudouridine
  modified_base 2143: mod_base = OTHER; note = N1-methylpseudouridine
  modified_base 2146: mod_base = OTHER; note = N1-methylpseudouridine
  modified_base 2147: mod_base = OTHER; note = N1-methylpseudouridine
  modified_base 2153: mod_base = OTHER; note = N1-methylpseudouridine
  modified_base 2155: mod_base = OTHER; note = N1-methylpseudouridine
  modified_base 2165: mod_base = OTHER; note = N1-methylpseudouridine
  modified_base 2174: mod_base = OTHER; note = N1-methylpseudouridine
  modified_base 2179: mod_base = OTHER; note = N1-methylpseudouridine
  modified_base 2183: mod_base = OTHER; note = N1-methylpseudouridine
  modified_base 2195: mod_base = OTHER; note = N1-methylpseudouridine
  modified_base 2209: mod_base = OTHER; note = N1-methylpseudouridine
  modified_base 2210: mod_base = OTHER; note = N1-methylpseudouridine
  modified_base 2213: mod_base = OTHER; note = N1-methylpseudouridine
  modified_base 2237: mod_base = OTHER; note = N1-methylpseudouridine
  modified_base 2240: mod_base = OTHER; note = N1-methylpseudouridine
  modified_base 2246: mod_base = OTHER; note = N1-methylpseudouridine
  modified_base 2249: mod_base = OTHER; note = N1-methylpseudouridine
  modified_base 2251: mod_base = OTHER; note = N1-methylpseudouridine
  modified_base 2252: mod_base = OTHER; note = N1-methylpseudouridine
  modified_base 2270: mod_base = OTHER; note = N1-methylpseudouridine
  modified_base 2276: mod_base = OTHER; note = N1-methylpseudouridine
  modified_base 2285: mod_base = OTHER; note = N1-methylpseudouridine
  modified_base 2296: mod_base = OTHER; note = N1-methylpseudouridine
  modified_base 2299: mod_base = OTHER; note = N1-methylpseudouridine
  modified_base 2300: mod_base = OTHER; note = N1-methylpseudouridine
  modified_base 2309: mod_base = OTHER; note = N1-methylpseudouridine
  modified_base 2314: mod_base = OTHER; note = N1-methylpseudouridine
  modified_base 2317: mod_base = OTHER; note = N1-methylpseudouridine
  modified_base 2318: mod_base = OTHER; note = N1-methylpseudouridine
  modified_base 2327: mod_base = OTHER; note = N1-methylpseudouridine
  modified_base 2333: mod_base = OTHER; note = N1-methylpseudouridine
  modified_base 2342: mod_base = OTHER; note = N1-methylpseudouridine
  modified_base 2353: mod_base = OTHER; note = N1-methylpseudouridine
  modified_base 2354: mod_base = OTHER; note = N1-methylpseudouridine
  modified_base 2366: mod_base = OTHER; note = N1-methylpseudouridine
  modified_base 2374: mod_base = OTHER; note = N1-methylpseudouridine
  modified_base 2384: mod_base = OTHER; note = N1-methylpseudouridine
  modified_base 2387: mod_base = OTHER; note = N1-methylpseudouridine
  modified_base 2393: mod_base = OTHER; note = N1-methylpseudouridine
  modified_base 2396: mod_base = OTHER; note = N1-methylpseudouridine
  modified_base 2410: mod_base = OTHER; note = N1-methylpseudouridine
  modified_base 2411: mod_base = OTHER; note = N1-methylpseudouridine
  modified_base 2414: mod_base = OTHER; note = N1-methylpseudouridine
  modified_base 2438: mod_base = OTHER; note = N1-methylpseudouridine
  modified_base 2441: mod_base = OTHER; note = N1-methylpseudouridine
  modified_base 2450: mod_base = OTHER; note = N1-methylpseudouridine
  modified_base 2453: mod_base = OTHER; note = N1-methylpseudouridine
  modified_base 2456: mod_base = OTHER; note = N1-methylpseudouridine
  modified_base 2462: mod_base = OTHER; note = N1-methylpseudouridine
  modified_base 2468: mod_base = OTHER; note = N1-methylpseudouridine
  modified_base 2470: mod_base = OTHER; note = N1-methylpseudouridine
  modified_base 2471: mod_base = OTHER; note = N1-methylpseudouridine
  modified_base 2486: mod_base = OTHER; note = N1-methylpseudouridine
  modified_base 2489: mod_base = OTHER; note = N1-methylpseudouridine
  modified_base 2501: mod_base = OTHER; note = N1-methylpseudouridine
  modified_base 2509: mod_base = OTHER; note = N1-methylpseudouridine
  modified_base 2519: mod_base = OTHER; note = N1-methylpseudouridine
  modified_base 2521: mod_base = OTHER; note = N1-methylpseudouridine
  modified_base 2522: mod_base = OTHER; note = N1-methylpseudouridine
  modified_base 2534: mod_base = OTHER; note = N1-methylpseudouridine
  modified_base 2537: mod_base = OTHER; note = N1-methylpseudouridine
  modified_base 2546: mod_base = OTHER; note = N1-methylpseudouridine
  modified_base 2560: mod_base = OTHER; note = N1-methylpseudouridine
  modified_base 2569: mod_base = OTHER; note = N1-methylpseudouridine
  modified_base 2579: mod_base = OTHER; note = N1-methylpseudouridine
  modified_base 2591: mod_base = OTHER; note = N1-methylpseudouridine
  modified_base 2594: mod_base = OTHER; note = N1-methylpseudouridine
  modified_base 2603: mod_base = OTHER; note = N1-methylpseudouridine
  modified_base 2630: mod_base = OTHER; note = N1-methylpseudouridine
  modified_base 2633: mod_base = OTHER; note = N1-methylpseudouridine
  modified_base 2638: mod_base = OTHER; note = N1-methylpseudouridine
  modified_base 2639: mod_base = OTHER; note = N1-methylpseudouridine
  modified_base 2642: mod_base = OTHER; note = N1-methylpseudouridine
  modified_base 2656: mod_base = OTHER; note = N1-methylpseudouridine
  modified_base 2657: mod_base = OTHER; note = N1-methylpseudouridine
  modified_base 2671: mod_base = OTHER; note = N1-methylpseudouridine
  modified_base 2672: mod_base = OTHER; note = N1-methylpseudouridine
  modified_base 2675: mod_base = OTHER; note = N1-methylpseudouridine
  modified_base 2681: mod_base = OTHER; note = N1-methylpseudouridine
  modified_base 2684: mod_base = OTHER; note = N1-methylpseudouridine
  modified_base 2699: mod_base = OTHER; note = N1-methylpseudouridine
  modified_base 2704: mod_base = OTHER; note = N1-methylpseudouridine
  modified_base 2705: mod_base = OTHER; note = N1-methylpseudouridine
  modified_base 2717: mod_base = OTHER; note = N1-methylpseudouridine
  modified_base 2732: mod_base = OTHER; note = N1-methylpseudouridine
  modified_base 2753: mod_base = OTHER; note = N1-methylpseudouridine
  modified_base 2765: mod_base = OTHER; note = N1-methylpseudouridine
  modified_base 2774: mod_base = OTHER; note = N1-methylpseudouridine
  modified_base 2792: mod_base = OTHER; note = N1-methylpseudouridine
  modified_base 2804: mod_base = OTHER; note = N1-methylpseudouridine
  modified_base 2807: mod_base = OTHER; note = N1-methylpseudouridine
  modified_base 2816: mod_base = OTHER; note = N1-methylpseudouridine
  modified_base 2822: mod_base = OTHER; note = N1-methylpseudouridine
  modified_base 2825: mod_base = OTHER; note = N1-methylpseudouridine
  modified_base 2834: mod_base = OTHER; note = N1-methylpseudouridine
  modified_base 2837: mod_base = OTHER; note = N1-methylpseudouridine
  modified_base 2843: mod_base = OTHER; note = N1-methylpseudouridine
  modified_base 2846: mod_base = OTHER; note = N1-methylpseudouridine
  modified_base 2870: mod_base = OTHER; note = N1-methylpseudouridine
  modified_base 2873: mod_base = OTHER; note = N1-methylpseudouridine
  modified_base 2876: mod_base = OTHER; note = N1-methylpseudouridine
  modified_base 2882: mod_base = OTHER; note = N1-methylpseudouridine
  modified_base 2936: mod_base = OTHER; note = N1-methylpseudouridine
  modified_base 2945: mod_base = OTHER; note = N1-methylpseudouridine
  modified_base 2957: mod_base = OTHER; note = N1-methylpseudouridine
  modified_base 2966: mod_base = OTHER; note = N1-methylpseudouridine
  modified_base 2978: mod_base = OTHER; note = N1-methylpseudouridine
  modified_base 2981: mod_base = OTHER; note = N1-methylpseudouridine
  modified_base 2996: mod_base = OTHER; note = N1-methylpseudouridine
  modified_base 3011: mod_base = OTHER; note = N1-methylpseudouridine
  modified_base 3026: mod_base = OTHER; note = N1-methylpseudouridine
  modified_base 3028: mod_base = OTHER; note = N1-methylpseudouridine
  modified_base 3032: mod_base = OTHER; note = N1-methylpseudouridine
  modified_base 3034: mod_base = OTHER; note = N1-methylpseudouridine
  modified_base 3037: mod_base = OTHER; note = N1-methylpseudouridine
  modified_base 3041: mod_base = OTHER; note = N1-methylpseudouridine
  modified_base 3059: mod_base = OTHER; note = N1-methylpseudouridine
  modified_base 3061: mod_base = OTHER; note = N1-methylpseudouridine
  modified_base 3065: mod_base = OTHER; note = N1-methylpseudouridine
  modified_base 3077: mod_base = OTHER; note = N1-methylpseudouridine
  modified_base 3083: mod_base = OTHER; note = N1-methylpseudouridine
  modified_base 3092: mod_base = OTHER; note = N1-methylpseudouridine
  modified_base 3100: mod_base = OTHER; note = N1-methylpseudouridine
  modified_base 3107: mod_base = OTHER; note = N1-methylpseudouridine
  modified_base 3116: mod_base = OTHER; note = N1-methylpseudouridine
  modified_base 3119: mod_base = OTHER; note = N1-methylpseudouridine
  modified_base 3130: mod_base = OTHER; note = N1-methylpseudouridine
  modified_base 3131: mod_base = OTHER; note = N1-methylpseudouridine
  modified_base 3134: mod_base = OTHER; note = N1-methylpseudouridine
  modified_base 3149: mod_base = OTHER; note = N1-methylpseudouridine
  modified_base 3161: mod_base = OTHER; note = N1-methylpseudouridine
  modified_base 3164: mod_base = OTHER; note = N1-methylpseudouridine
  modified_base 3203: mod_base = OTHER; note = N1-methylpseudouridine
  modified_base 3218: mod_base = OTHER; note = N1-methylpseudouridine
  modified_base 3221: mod_base = OTHER; note = N1-methylpseudouridine
  modified_base 3230: mod_base = OTHER; note = N1-methylpseudouridine
  modified_base 3238: mod_base = OTHER; note = N1-methylpseudouridine
  modified_base 3241: mod_base = OTHER; note = N1-methylpseudouridine
  modified_base 3251: mod_base = OTHER; note = N1-methylpseudouridine
  modified_base 3254: mod_base = OTHER; note = N1-methylpseudouridine
  modified_base 3266: mod_base = OTHER; note = N1-methylpseudouridine
  modified_base 3269: mod_base = OTHER; note = N1-methylpseudouridine
  modified_base 3283: mod_base = OTHER; note = N1-methylpseudouridine
  modified_base 3284: mod_base = OTHER; note = N1-methylpseudouridine
  modified_base 3293: mod_base = OTHER; note = N1-methylpseudouridine
  modified_base 3317: mod_base = OTHER; note = N1-methylpseudouridine
  modified_base 3326: mod_base = OTHER; note = N1-methylpseudouridine
  modified_base 3340: mod_base = OTHER; note = N1-methylpseudouridine
  modified_base 3341: mod_base = OTHER; note = N1-methylpseudouridine
  modified_base 3344: mod_base = OTHER; note = N1-methylpseudouridine
  modified_base 3356: mod_base = OTHER; note = N1-methylpseudouridine
  modified_base 3359: mod_base = OTHER; note = N1-methylpseudouridine
  modified_base 3374: mod_base = OTHER; note = N1-methylpseudouridine
  modified_base 3386: mod_base = OTHER; note = N1-methylpseudouridine
  modified_base 3395: mod_base = OTHER; note = N1-methylpseudouridine
  modified_base 3398: mod_base = OTHER; note = N1-methylpseudouridine
  modified_base 3410: mod_base = OTHER; note = N1-methylpseudouridine
  modified_base 3421: mod_base = OTHER; note = N1-methylpseudouridine
  modified_base 3440: mod_base = OTHER; note = N1-methylpseudouridine
  modified_base 3443: mod_base = OTHER; note = N1-methylpseudouridine
  modified_base 3452: mod_base = OTHER; note = N1-methylpseudouridine
  modified_base 3458: mod_base = OTHER; note = N1-methylpseudouridine
  modified_base 3461: mod_base = OTHER; note = N1-methylpseudouridine
  modified_base 3467: mod_base = OTHER; note = N1-methylpseudouridine
  modified_base 3479: mod_base = OTHER; note = N1-methylpseudouridine
  modified_base 3482: mod_base = OTHER; note = N1-methylpseudouridine
  modified_base 3490: mod_base = OTHER; note = N1-methylpseudouridine
  modified_base 3491: mod_base = OTHER; note = N1-methylpseudouridine
  modified_base 3502: mod_base = OTHER; note = N1-methylpseudouridine
  modified_base 3503: mod_base = OTHER; note = N1-methylpseudouridine
  modified_base 3508: mod_base = OTHER; note = N1-methylpseudouridine
  modified_base 3509: mod_base = OTHER; note = N1-methylpseudouridine
  modified_base 3511: mod_base = OTHER; note = N1-methylpseudouridine
  modified_base 3518: mod_base = OTHER; note = N1-methylpseudouridine
  modified_base 3527: mod_base = OTHER; note = N1-methylpseudouridine
  modified_base 3535: mod_base = OTHER; note = N1-methylpseudouridine
  modified_base 3556: mod_base = OTHER; note = N1-methylpseudouridine
  modified_base 3560: mod_base = OTHER; note = N1-methylpseudouridine
  modified_base 3569: mod_base = OTHER; note = N1-methylpseudouridine
  modified_base 3572: mod_base = OTHER; note = N1-methylpseudouridine
  modified_base 3584: mod_base = OTHER; note = N1-methylpseudouridine
  modified_base 3587: mod_base = OTHER; note = N1-methylpseudouridine
  modified_base 3595: mod_base = OTHER; note = N1-methylpseudouridine
  modified_base 3605: mod_base = OTHER; note = N1-methylpseudouridine
  modified_base 3616: mod_base = OTHER; note = N1-methylpseudouridine
  modified_base 3617: mod_base = OTHER; note = N1-methylpseudouridine
  modified_base 3620: mod_base = OTHER; note = N1-methylpseudouridine
  modified_base 3622: mod_base = OTHER; note = N1-methylpseudouridine
  modified_base 3631: mod_base = OTHER; note = N1-methylpseudouridine
  modified_base 3638: mod_base = OTHER; note = N1-methylpseudouridine
  modified_base 3640: mod_base = OTHER; note = N1-methylpseudouridine
  modified_base 3647: mod_base = OTHER; note = N1-methylpseudouridine
  modified_base 3656: mod_base = OTHER; note = N1-methylpseudouridine
  modified_base 3659: mod_base = OTHER; note = N1-methylpseudouridine
  modified_base 3680: mod_base = OTHER; note = N1-methylpseudouridine
  modified_base 3700: mod_base = OTHER; note = N1-methylpseudouridine
  modified_base 3703: mod_base = OTHER; note = N1-methylpseudouridine
  modified_base 3704: mod_base = OTHER; note = N1-methylpseudouridine
  modified_base 3706: mod_base = OTHER; note = N1-methylpseudouridine
  modified_base 3707: mod_base = OTHER; note = N1-methylpseudouridine
  modified_base 3709: mod_base = OTHER; note = N1-methylpseudouridine
  modified_base 3719: mod_base = OTHER; note = N1-methylpseudouridine
  modified_base 3722: mod_base = OTHER; note = N1-methylpseudouridine
  modified_base 3727: mod_base = OTHER; note = N1-methylpseudouridine
  modified_base 3728: mod_base = OTHER; note = N1-methylpseudouridine
  modified_base 3730: mod_base = OTHER; note = N1-methylpseudouridine
  modified_base 3731: mod_base = OTHER; note = N1-methylpseudouridine
  modified_base 3743: mod_base = OTHER; note = N1-methylpseudouridine
  modified_base 3749: mod_base = OTHER; note = N1-methylpseudouridine
  modified_base 3764: mod_base = OTHER; note = N1-methylpseudouridine
  modified_base 3779: mod_base = OTHER; note = N1-methylpseudouridine
  modified_base 3782: mod_base = OTHER; note = N1-methylpseudouridine
  modified_base 3809: mod_base = OTHER; note = N1-methylpseudouridine
  modified_base 3812: mod_base = OTHER; note = N1-methylpseudouridine
  modified_base 3814: mod_base = OTHER; note = N1-methylpseudouridine
  modified_base 3832: mod_base = OTHER; note = N1-methylpseudouridine
  modified_base 3833: mod_base = OTHER; note = N1-methylpseudouridine
  modified_base 3842: mod_base = OTHER; note = N1-methylpseudouridine
  modified_base 3851: mod_base = OTHER; note = N1-methylpseudouridine
  modified_base 3854: mod_base = OTHER; note = N1-methylpseudouridine
  modified_base 3860: mod_base = OTHER; note = N1-methylpseudouridine
  modified_base 3869: mod_base = OTHER; note = N1-methylpseudouridine
  modified_base 3875: mod_base = OTHER; note = N1-methylpseudouridine
  modified_base 3878: mod_base = OTHER; note = N1-methylpseudouridine
  modified_base 3893: mod_base = OTHER; note = N1-methylpseudouridine
  modified_base 3907: mod_base = OTHER; note = N1-methylpseudouridine
  modified_base 3908: mod_base = OTHER; note = N1-methylpseudouridine
  modified_base 3923: mod_base = OTHER; note = N1-methylpseudouridine
  modified_base 3926: mod_base = OTHER; note = N1-methylpseudouridine
  modified_base 3950: mod_base = OTHER; note = N1-methylpseudouridine
  modified_base 3953: mod_base = OTHER; note = N1-methylpseudouridine
  modified_base 3970: mod_base = OTHER; note = N1-methylpseudouridine
  modified_base 3985: mod_base = OTHER; note = N1-methylpseudouridine
  modified_base 3994: mod_base = OTHER; note = N1-methylpseudouridine
  modified_base 3995: mod_base = OTHER; note = N1-methylpseudouridine
  modified_base 4010: mod_base = OTHER; note = N1-methylpseudouridine
  modified_base 4015: mod_base = OTHER; note = N1-methylpseudouridine
  modified_base 4022: mod_base = OTHER; note = N1-methylpseudouridine
  modified_base 4025: mod_base = OTHER; note = N1-methylpseudouridine
  modified_base 4028: mod_base = OTHER; note = N1-methylpseudouridine
  modified_base 4031: mod_base = OTHER; note = N1-methylpseudouridine
  modified_base 4040: mod_base = OTHER; note = N1-methylpseudouridine
  modified_base 4064: mod_base = OTHER; note = N1-methylpseudouridine
  modified_base 4073: mod_base = OTHER; note = N1-methylpseudouridine
  modified_base 4082: mod_base = OTHER; note = N1-methylpseudouridine
  modified_base 4085: mod_base = OTHER; note = N1-methylpseudouridine
  modified_base 4091: mod_base = OTHER; note = N1-methylpseudouridine
  modified_base 4097: mod_base = OTHER; note = N1-methylpseudouridine
  modified_base 4100: mod_base = OTHER; note = N1-methylpseudouridine
  modified_base 4114: mod_base = OTHER; note = N1-methylpseudouridine
  modified_base 4115: mod_base = OTHER; note = N1-methylpseudouridine
  modified_base 4130: mod_base = OTHER; note = N1-methylpseudouridine
  modified_base 4135: mod_base = OTHER; note = N1-methylpseudouridine
  modified_base 4136: mod_base = OTHER; note = N1-methylpseudouridine
  modified_base 4139: mod_base = OTHER; note = N1-methylpseudouridine
  modified_base 4153: mod_base = OTHER; note = N1-methylpseudouridine
  modified_base 4163: mod_base = OTHER; note = N1-methylpseudouridine
  modified_base 4175: mod_base = OTHER; note = N1-methylpseudouridine
  modified_base 4178: mod_base = OTHER; note = N1-methylpseudouridine
  modified_base 4181: mod_base = OTHER; note = N1-methylpseudouridine
  modified_base 4187: mod_base = OTHER; note = N1-methylpseudouridine
  modified_base 4195: mod_base = OTHER; note = N1-methylpseudouridine
  modified_base 4202: mod_base = OTHER; note = N1-methylpseudouridine
  modified_base 4204: mod_base = OTHER; note = N1-methylpseudouridine
  modified_base 4205: mod_base = OTHER; note = N1-methylpseudouridine
  modified_base 4211: mod_base = OTHER; note = N1-methylpseudouridine
  modified_base 4232: mod_base = OTHER; note = N1-methylpseudouridine
  modified_base 4235: mod_base = OTHER; note = N1-methylpseudouridine
  modified_base 4253: mod_base = OTHER; note = N1-methylpseudouridine
  modified_base 4271: mod_base = OTHER; note = N1-methylpseudouridine
  modified_base 4277: mod_base = OTHER; note = N1-methylpseudouridine
  modified_base 4288: mod_base = OTHER; note = N1-methylpseudouridine
  modified_base 4292: mod_base = OTHER; note = N1-methylpseudouridine
  modified_base 4297: mod_base = OTHER; note = N1-methylpseudouridine
  modified_base 4298: mod_base = OTHER; note = N1-methylpseudouridine
  modified_base 4301: mod_base = OTHER; note = N1-methylpseudouridine
  modified_base 4303: mod_base = OTHER; note = N1-methylpseudouridine
  modified_base 4307: mod_base = OTHER; note = N1-methylpseudouridine
  modified_base 4318: mod_base = OTHER; note = N1-methylpseudouridine
  modified_base 4328: mod_base = OTHER; note = N1-methylpseudouridine
  modified_base 4364: mod_base = OTHER; note = N1-methylpseudouridine
  modified_base 4366: mod_base = OTHER; note = N1-methylpseudouridine
  modified_base 4367: mod_base = OTHER; note = N1-methylpseudouridine
  modified_base 4370: mod_base = OTHER; note = N1-methylpseudouridine
  modified_base 4387: mod_base = OTHER; note = N1-methylpseudouridine
  modified_base 4391: mod_base = OTHER; note = N1-methylpseudouridine
  modified_base 4400: mod_base = OTHER; note = N1-methylpseudouridine
  modified_base 4403: mod_base = OTHER; note = N1-methylpseudouridine
  modified_base 4412: mod_base = OTHER; note = N1-methylpseudouridine
  modified_base 4420: mod_base = OTHER; note = N1-methylpseudouridine
  modified_base 4421: mod_base = OTHER; note = N1-methylpseudouridine
  modified_base 4433: mod_base = OTHER; note = N1-methylpseudouridine
  modified_base 4436: mod_base = OTHER; note = N1-methylpseudouridine
  modified_base 4439: mod_base = OTHER; note = N1-methylpseudouridine
  modified_base 4454: mod_base = OTHER; note = N1-methylpseudouridine
  modified_base 4463: mod_base = OTHER; note = N1-methylpseudouridine
  modified_base 4466: mod_base = OTHER; note = N1-methylpseudouridine
  modified_base 4474: mod_base = OTHER; note = N1-methylpseudouridine
  modified_base 4499: mod_base = OTHER; note = N1-methylpseudouridine
  modified_base 4520: mod_base = OTHER; note = N1-methylpseudouridine
  modified_base 4523: mod_base = OTHER; note = N1-methylpseudouridine
  modified_base 4529: mod_base = OTHER; note = N1-methylpseudouridine
  modified_base 4531: mod_base = OTHER; note = N1-methylpseudouridine
  modified_base 4532: mod_base = OTHER; note = N1-methylpseudouridine
  modified_base 4538: mod_base = OTHER; note = N1-methylpseudouridine
  modified_base 4547: mod_base = OTHER; note = N1-methylpseudouridine
  modified_base 4564: mod_base = OTHER; note = N1-methylpseudouridine
  modified_base 4565: mod_base = OTHER; note = N1-methylpseudouridine
  modified_base 4570: mod_base = OTHER; note = N1-methylpseudouridine
  modified_base 4573: mod_base = OTHER; note = N1-methylpseudouridine
  modified_base 4574: mod_base = OTHER; note = N1-methylpseudouridine
  modified_base 4586: mod_base = OTHER; note = N1-methylpseudouridine
  modified_base 4600: mod_base = OTHER; note = N1-methylpseudouridine
  modified_base 4619: mod_base = OTHER; note = N1-methylpseudouridine
  modified_base 4622: mod_base = OTHER; note = N1-methylpseudouridine
  modified_base 4634: mod_base = OTHER; note = N1-methylpseudouridine
  modified_base 4637: mod_base = OTHER; note = N1-methylpseudouridine
  modified_base 4649: mod_base = OTHER; note = N1-methylpseudouridine
  modified_base 4658: mod_base = OTHER; note = N1-methylpseudouridine
  modified_base 4660: mod_base = OTHER; note = N1-methylpseudouridine
  modified_base 4673: mod_base = OTHER; note = N1-methylpseudouridine
  modified_base 4679: mod_base = OTHER; note = N1-methylpseudouridine
  modified_base 4688: mod_base = OTHER; note = N1-methylpseudouridine
  modified_base 4735: mod_base = OTHER; note = N1-methylpseudouridine
  modified_base 4736: mod_base = OTHER; note = N1-methylpseudouridine
  modified_base 4763: mod_base = OTHER; note = N1-methylpseudouridine
  modified_base 4765: mod_base = OTHER; note = N1-methylpseudouridine
atgagcgaggtggagttcagccacgagtactggatgcggcacgccctgaccctggccaagcgggcccgggacgagcgggaggtgcccgtgggcgccgtgctggtgctgaacaaccgggtgatcggcgagggctggaaccgggccatcggcctgcacgaccccaccgcccacgccgagatcatggccctgcggcagggcggcctggtgatgcagaactaccggctgatcgacgccaccctgtacgtgaccttcgagccctgcgtgatgtgcgccggcgccatgatccacagccggatcggccgggtggtgttcggcgtgcggaacgccaagaccggcgccgccggcagcctgatggacgtgctgcaccaccccggcatgaaccaccgggtggagatcaccgagggcatcctggccgacgagtgcgccgccctgctgtgccggttcttccggatgccccggcgggtgttcaacgcccagaagaaggcccagagcagcaccgacagcggcggcagcagcggcggcagcagcggcagcgagacacccggcaccagcgagagcgccacccccgagagcagcggcggcagcagcggcggcagcgacaagaagtacagcatcggcctggccatcggcaccaacagcgtgggctgggccgtgatcaccgacgagtacaaggtgcccagcaagaagttcaaggtgctgggcaacaccgaccggcacagcatcaagaagaacctgatcggcgccctgctgttcgacagcggcgagacagccgaggccacccggctgaagcggaccgcccggcggcggtacacccggcggaagaaccggatctgctacctgcaggagatcttcagcaacgagatggccaaggtggacgacagcttcttccaccggctggaggagagcttcctggtggaggaggacaagaagcacgagcggcaccccatcttcggcaacatcgtggacgaggtggcctaccacgagaagtaccccaccatctaccacctgcggaagaagctggtggacagcaccgacaaggccgacctgcggctgatctacctggccctggcccacatgatcaagttccggggccacttcctgatcgagggcgacctgaaccccgacaacagcgacgtggacaagctgttcatccagctggtgcagacctacaaccagctgttcgaggagaaccccatcaacgccagcggcgtggacgccaaggccatcctgagcgcccggctgagcaagagccggcggctggagaacctgatcgcccagctgcccggcgagaagaagaacggcctgttcggcaacctgatcgccctgagcctgggcctgacccccaacttcaagagcaacttcgacctggccgaggacgccaagctgcagctgagcaaggacacctacgacgacgacctggacaacctgctggcccagatcggcgaccagtacgccgacctgttcctggccgccaagaacctgagcgacgccatcctgctgagcgacatcctgcgggtgaacaccgagatcaccaaggcccccctgagcgccagcatgatcaagcggtacgacgagcaccaccaggacctgaccctgctgaaggccctggtgcggcagcagctgcccgagaagtacaaggagatcttcttcgaccagagcaagaacggctacgccggctacatcgacggcggcgccagccaggaggagttctacaagttcatcaagcccatcctggagaagatggacggcaccgaggagctgctggtgaagctgaaccgggaggacctgctgcggaagcagcggaccttcgacaacggcagcatcccccaccagatccacctgggcgagctgcacgccatcctgcggcggcaggaggacttctaccccttcctgaaggacaaccgggagaagatcgagaagatcctgaccttccggatcccctactacgtgggccccctggcccggggcaacagccggttcgcctggatgacccgcaagagcgaggagacaatcaccccctggaacttcgaggaggtggtggacaagggcgccagcgcccagagcttcatcgagcggatgaccaacttcgacaagaacctgcccaacgagaaggtgctgcccaagcacagcctgctgtacgagtacttcaccgtgtacaacgagctgaccaaggtgaagtacgtgaccgagggcatgcggaagcccgccttcctgagcggcgagcagaagaaggccatcgtggacctgctgttcaagaccaaccggaaggtgaccgtgaagcagctgaaggaggactacttcaagaagatcgagtgcttcgacagcgtggagatcagcggcgtggaggaccggttcaacgccagcctgggcacctaccacgacctgctgaagatcatcaaggacaaggacttcctggacaacgaggagaacgaggacatcctggaggacatcgtgctgaccctgaccctgttcgaggaccgggagatgatcgaggagcggctgaagacctacgcccacctgttcgacgacaaggtgatgaagcagctgaagcggcggcggtacaccggctggggccggctgagccggaagctgatcaacggcatccgggacaagcagagcggcaagaccatcctggacttcctcaagagcgacggcttcgccaaccggaacttcatgcagctgatccacgacgacagcctgaccttcaaggaggacatccagaaggcccaggtgagcggccagggcgacagcctgcacgagcacatcgccaacctggccggcagccccgccatcaagaagggcatcctgcagaccgtgaaggtggtggacgagctggtgaaggtgatgggccggcacaagcccgagaacatcgtgatcgagatggcccgggagaaccagaccacccagaagggccagaagaacagccgggagcggatgaagcggatcgaggagggcatcaaggagctgggcagccagatcctgaaggagcaccccgtggagaacacccagctgcagaacgagaagctgtacctgtactacctgcagaacggccgggacatgtacgtggaccaggagctggacatcaaccggctgagcgactacgacgtggaccacatcgtgccccagagcttcctggccgacgacagcatcgacaacaaggtgctgacccggagcgacaagaaccggggcaagagcgacaacgtgcccagcgaggaggtggtgaagaagatgaagaactactggcggcagctgctgaacgccaagctgatcacccagcggaagttcgacaacctgaccaaggccgagcggggcggcctgagcgagctggacaaggccggcttcatcaagcggcagctggtggagacacggcagatcaccaagcacgtggcccagatcctggacagccggatgaacaccaagtacgacgagaacgacaagctgatccgggaggtgaaggtgatcaccctcaagagcaagctggtgagcgacttccggaaggacttccagttctacaaggtgcgggagatcaacaactaccaccacgcccacgacgcctacctgaacgccgtggtgggcaccgccctgatcaagaagtaccccgccctggagagcgagttcgtgtacggcgactacaaggtgtacgacgtgcggaagatgatcgccaagagcgagcaggagatcggcaaggccaccgccaagtacttcttctacagcaacatcatgaacttcttcaagaccgagatcaccctggccaacggcgagatccggaaggcccccctgatcgagacaaacggcgagacaggcgagatcgtgtgggacaagggccgggacttcgccaccgtgcggaaggtgctgagcatgccccaggtgaacatcgtgaagaagaccgaggtgcagaccggcggcttcagcaaggagagcatcctgcccaagcggaacagcgacaagctgatcgcccggaagaaggactgggaccccaagaagtacggcggcttcgacagccccaccgtggcctacagcgtgctggtggtggccaaggtggagaagggcaagagcaagaagctcaagagcgtgaaggagctgctgggcatcaccatcatggagcggagcagcttcgagaagaaccccatcgacttcctggaggccaagggctacaaggaggtgaagaaggacctgatcatcaagctgcccaagtacagcctgttcgagctggagaacggccggaagcggatgctggccagcgccggcgagctgcagaagggcaacgagctggccctgcccagcaagtacgtgaacttcctgtacctggccagccactacgagaagctgaagggcagccccgaggacaacgagcagaagcagctgttcgtggagcagcacaagcactacctggacgagatcatcgagcagatcagcgagttcagcaagcgggtgatcctggccgacgccaacctggacaaggtgctgagcgcctacaacaagcaccgggacaagcccatccgggagcaggccgagaacatcatccacctgttcaccctgaccaacctgggcgcccccgccgccttcaagtacttcgacaccaccatcgaccggaagcggtacaccagcaccaaggaggtgctggacgccaccctgatccaccagagcatcaccggcctgtacgagacacggatcgacctgagccagctgggcggcgacgagggcgccgacaagcggaccgccgacggcagcgagttcgagagccccaagaagaagcggaaggtgtga

SEQ ID NO: 728 - protein, 1588 aa, synthetic construct
MSEVEFSHEYWMRHALTLAKRARDEREVPVGAVLVLNNRVIGEGWNRAIGLHDPTAHAEIMALRQGGLVMQNYRLIDATLYVTFEPCVMCAGAMIHSRIGRVVFGVRNAKTGAAGSLMDVLHHPGMNHRVEITEGILADECAALLCRFFRMPRRVFNAQKKAQSSTDSGGSSGGSSGSETPGTSESATPESSGGSSGGSDKKYSIGLAIGTNSVGWAVITDEYKVPSKKFKVLGNTDRHSIKKNLIGALLFDSGETAEATRLKRTARRRYTRRKNRICYLQEIFSNEMAKVDDSFFHRLEESFLVEEDKKHERHPIFGNIVDEVAYHEKYPTIYHLRKKLVDSTDKADLRLIYLALAHMIKFRGHFLIEGDLNPDNSDVDKLFIQLVQTYNQLFEENPINASGVDAKAILSARLSKSRRLENLIAQLPGEKKNGLFGNLIALSLGLTPNFKSNFDLAEDAKLQLSKDTYDDDLDNLLAQIGDQYADLFLAAKNLSDAILLSDILRVNTEITKAPLSASMIKRYDEHHQDLTLLKALVRQQLPEKYKEIFFDQSKNGYAGYIDGGASQEEFYKFIKPILEKMDGTEELLVKLNREDLLRKQRTFDNGSIPHQIHLGELHAILRRQEDFYPFLKDNREKIEKILTFRIPYYVGPLARGNSRFAWMTRKSEETITPWNFEEVVDKGASAQSFIERMTNFDKNLPNEKVLPKHSLLYEYFTVYNELTKVKYVTEGMRKPAFLSGEQKKAIVDLLFKTNRKVTVKQLKEDYFKKIECFDSVEISGVEDRFNASLGTYHDLLKIIKDKDFLDNEENEDILEDIVLTLTLFEDREMIEERLKTYAHLFDDKVMKQLKRRRYTGWGRLSRKLINGIRDKQSGKTILDFLKSDGFANRNFMQLIHDDSLTFKEDIQKAQVSGQGDSLHEHIANLAGSPAIKKGILQTVKVVDELVKVMGRHKPENIVIEMARENQTTQKGQKNSRERMKRIEEGIKELGSQILKEHPVENTQLQNEKLYLYYLQNGRDMYVDQELDINRLSDYDVDHIVPQSFLADDSIDNKVLTRSDKNRGKSDNVPSEEVVKKMKNYWRQLLNAKLITQRKFDNLTKAERGGLSELDKAGFIKRQLVETRQITKHVAQILDSRMNTKYDENDKLIREVKVITLKSKLVSDFRKDFQFYKVREINNYHHAHDAYLNAVVGTALIKKYPALESEFVYGDYKVYDVRKMIAKSEQEIGKATAKYFFYSNIMNFFKTEITLANGEIRKAPLIETNGETGEIVWDKGRDFATVRKVLSMPQVNIVKKTEVQTGGFSKESILPKRNSDKLIARKKDWDPKKYGGFDSPTVAYSVLVVAKVEKGKSKKLKSVKELLGITIMERSSFEKNPIDFLEAKGYKEVKKDLIIKLPKYSLFELENGRKRMLASAGELQKGNELALPSKYVNFLYLASHYEKLKGSPEDNEQKQLFVEQHKHYLDEIIEQISEFSKRVILADANLDKVLSAYNKHRDKPIREQAENIIHLFTLTNLGAPAAFKYFDTTIDRKRYTSTKEVLDATLIHQSITGLYETRIDLSQLGGDEGADKRTADGSEFESPKKKRKV

SEQ ID NO: 729 - RNA, 4767 nt, synthetic construct
  source 1..4767: mol_type = other RNA
  modified_base 2: mod_base = OTHER; note = N1-methylpseudouridine
  modified_base 11: mod_base = OTHER; note = N1-methylpseudouridine
  modified_base 16: mod_base = OTHER; note = N1-methylpseudouridine
  modified_base 17: mod_base = OTHER; note = N1-methylpseudouridine
  modified_base 28: mod_base = OTHER; note = N1-methylpseudouridine
  modified_base 31: mod_base = OTHER; note = N1-methylpseudouridine
  modified_base 35: mod_base = OTHER; note = N1-methylpseudouridine
  modified_base 47: mod_base = OTHER; note = N1-methylpseudouridine
  modified_base 53: mod_base = OTHER; note = N1-methylpseudouridine
  modified_base 83: mod_base = OTHER; note = N1-methylpseudouridine
  modified_base 89: mod_base = OTHER; note = N1-methylpseudouridine
  modified_base 98: mod_base = OTHER; note = N1-methylpseudouridine
  modified_base 101: mod_base = OTHER; note = N1-methylpseudouridine
  modified_base 104: mod_base = OTHER; note = N1-methylpseudouridine
  modified_base 107: mod_base = OTHER; note = N1-methylpseudouridine
  modified_base 119: mod_base = OTHER; note = N1-methylpseudouridine
  modified_base 122: mod_base = OTHER; note = N1-methylpseudouridine
  modified_base 133: mod_base = OTHER; note = N1-methylpseudouridine
  modified_base 146: mod_base = OTHER; note = N1-methylpseudouridine
  modified_base 152: mod_base = OTHER; note = N1-methylpseudouridine
  modified_base 179: mod_base = OTHER; note = N1-methylpseudouridine
  modified_base 182: mod_base = OTHER; note = N1-methylpseudouridine
  modified_base 188: mod_base = OTHER; note = N1-methylpseudouridine
  modified_base 203: mod_base = OTHER; note = N1-methylpseudouridine
  modified_base 206: mod_base = OTHER; note = N1-methylpseudouridine
  modified_base 209: mod_base = OTHER; note = N1-methylpseudouridine
  modified_base 217: mod_base = OTHER; note = N1-methylpseudouridine
  modified_base 224: mod_base = OTHER; note = N1-methylpseudouridine
  modified_base 227: mod_base = OTHER; note = N1-methylpseudouridine
  modified_base 239: mod_base = OTHER; note = N1-methylpseudouridine
  modified_base 241: mod_base = OTHER; note = N1-methylpseudouridine
  modified_base 245: mod_base = OTHER; note = N1-methylpseudouridine
  modified_base 250: mod_base = OTHER; note = N1-methylpseudouridine
  modified_base 251: mod_base = OTHER; note = N1-methylpseudouridine
  modified_base 259: mod_base = OTHER; note = N1-methylpseudouridine
  modified_base 263: mod_base = OTHER; note = N1-methylpseudouridine
  modified_base 266: mod_base = OTHER; note = N1-methylpseudouridine
  modified_base 268: mod_base = OTHER; note = N1-methylpseudouridine
  modified_base 281: mod_base = OTHER; note = N1-methylpseudouridine
  modified_base 284: mod_base = OTHER; note = N1-methylpseudouridine
  modified_base 296: mod_base = OTHER; note = N1-methylpseudouridine
  modified_base 305: mod_base = OTHER; note = N1-methylpseudouridine
  modified_base 308: mod_base = OTHER; note = N1-methylpseudouridine
  modified_base 310: mod_base = OTHER; note = N1-methylpseudouridine
  modified_base 311: mod_base = OTHER; note = N1-methylpseudouridine
  modified_base 317: mod_base = OTHER; note = N1-methylpseudouridine
  modified_base 350: mod_base = OTHER; note = N1-methylpseudouridine
  modified_base 353: mod_base = OTHER; note = N1-methylpseudouridine
  modified_base 359: mod_base = OTHER; note = N1-methylpseudouridine
  modified_base 362: mod_base = OTHER; note = N1-methylpseudouridine
  modified_base 377: mod_base = OTHER; note = N1-methylpseudouridine
  modified_base 389: mod_base = OTHER; note = N1-methylpseudouridine
  modified_base 395: mod_base = OTHER; note = N1-methylpseudouridine
  modified_base 407: mod_base = OTHER; note = N1-methylpseudouridine
  modified_base 410: mod_base = OTHER; note = N1-methylpseudouridine
  modified_base 421: mod_base = OTHER; note = N1-methylpseudouridine
  modified_base 431: mod_base = OTHER; note = N1-methylpseudouridine
  modified_base 434: mod_base = OTHER; note = N1-methylpseudouridine
  modified_base 436: mod_base = OTHER; note = N1-methylpseudouridine
  modified_base 442: mod_base = OTHER; note = N1-methylpseudouridine
  modified_base 443: mod_base = OTHER; note = N1-methylpseudouridine
  modified_base 445: mod_base = OTHER; note = N1-methylpseudouridine
  modified_base 446: mod_base = OTHER; note = N1-methylpseudouridine
  modified_base 452: mod_base = OTHER; note = N1-methylpseudouridine
  modified_base 464: mod_base = OTHER; note = N1-methylpseudouridine
  modified_base 466: mod_base = OTHER; note = N1-methylpseudouridine
  modified_base 467: mod_base = OTHER; note = N1-methylpseudouridine
  modified_base 607: mod_base = OTHER; note = N1-methylpseudouridine
  modified_base 614: mod_base = OTHER; note = N1-methylpseudouridine
  modified_base 620: mod_base = OTHER; note = N1-methylpseudouridine
  modified_base 626: mod_base = OTHER; note = N1-methylpseudouridine
  modified_base 641: mod_base = OTHER; note = N1-methylpseudouridine
  modified_base 646: mod_base = OTHER; note = N1-methylpseudouridine
  modified_base 653: mod_base = OTHER; note = N1-methylpseudouridine
  modified_base 656: mod_base = OTHER; note = N1-methylpseudouridine
  modified_base 667: mod_base = OTHER; note = N1-methylpseudouridine
  modified_base 674: mod_base = OTHER; note = N1-methylpseudouridine
  modified_base 688: mod_base = OTHER; note = N1-methylpseudouridine
  modified_base 689: mod_base = OTHER; note = N1-methylpseudouridine
  modified_base 695: mod_base = OTHER; note = N1-methylpseudouridine
  modified_base 698: mod_base = OTHER; note = N1-methylpseudouridine
  modified_base 722: mod_base = OTHER; note = N1-methylpseudouridine
  modified_base 734: mod_base = OTHER; note = N1-methylpseudouridine
  modified_base 737: mod_base = OTHER; note = N1-methylpseudouridine
  modified_base 746: mod_base = OTHER; note = N1-methylpseudouridine
  modified_base 749: mod_base = OTHER; note = N1-methylpseudouridine
  modified_base 751: mod_base = OTHER; note = N1-methylpseudouridine
  modified_base 752: mod_base = OTHER; note = N1-methylpseudouridine
  modified_base 785: mod_base = OTHER; note = N1-methylpseudouridine
  modified_base 808: mod_base = OTHER; note = N1-methylpseudouridine
  modified_base 830: mod_base = OTHER; note = N1-methylpseudouridine
  modified_base 832: mod_base = OTHER; note = N1-methylpseudouridine
  modified_base 835: mod_base = OTHER; note = N1-methylpseudouridine
  modified_base 839: mod_base = OTHER; note = N1-methylpseudouridine
  modified_base 848: mod_base = OTHER; note = N1-methylpseudouridine
  modified_base 850: mod_base = OTHER; note = N1-methylpseudouridine
  modified_base 851: mod_base = OTHER; note = N1-methylpseudouridine
  modified_base 863: mod_base = OTHER; note = N1-methylpseudouridine
  modified_base 872: mod_base = OTHER; note = N1-methylpseudouridine
  modified_base 883: mod_base = OTHER; note = N1-methylpseudouridine
  modified_base 884: mod_base = OTHER; note = N1-methylpseudouridine
  modified_base 886: mod_base = OTHER; note = N1-methylpseudouridine
  modified_base 887: mod_base = OTHER; note = N1-methylpseudouridine
  modified_base 896: mod_base = OTHER; note = N1-methylpseudouridine
  modified_base 907: mod_base = OTHER; note = N1-methylpseudouridine
  modified_base 908: mod_base = OTHER; note = N1-methylpseudouridine
  modified_base 911: mod_base = OTHER; note = N1-methylpseudouridine
  modified_base 914: mod_base = OTHER; note = N1-methylpseudouridine
  modified_base 947: mod_base = OTHER; note = N1-methylpseudouridine
  modified_base 949: mod_base = OTHER; note = N1-methylpseudouridine
  modified_base 950: mod_base = OTHER; note = N1-methylpseudouridine
  modified_base 959: mod_base = OTHER; note = N1-methylpseudouridine
  modified_base 962: mod_base = OTHER; note = N1-methylpseudouridine
  modified_base 971: mod_base = OTHER; note = N1-methylpseudouridine
  modified_base 976: mod_base = OTHER; note = N1-methylpseudouridine
  modified_base 988: mod_base = OTHER; note = N1-methylpseudouridine
  modified_base 998: mod_base = OTHER; note = N1-methylpseudouridine
  modified_base 1000: mod_base = OTHER; note = N1-methylpseudouridine
  modified_base 1007: mod_base = OTHER; note = N1-methylpseudouridine
  modified_base 1019: mod_base = OTHER; note = N1-methylpseudouridine
  modified_base 1022: mod_base = OTHER; note = N1-methylpseudouridine
  modified_base 1046: mod_base = OTHER; note = N1-methylpseudouridine
  modified_base 1052: mod_base = OTHER; note = N1-methylpseudouridine
  modified_base 1055: mod_base = OTHER; note = N1-methylpseudouridine
  modified_base 1057: mod_base = OTHER; note = N1-methylpseudouridine
  modified_base 1061: mod_base = OTHER; note = N1-methylpseudouridine
  modified_base 1067: mod_base = OTHER; note = N1-methylpseudouridine
  modified_base 1076: mod_base = OTHER; note = N1-methylpseudouridine
  modified_base 1079: mod_base = OTHER; note = N1-methylpseudouridine
  modified_base 1084: mod_base = OTHER; note = N1-methylpseudouridine
  modified_base 1085: mod_base = OTHER; note = N1-methylpseudouridine
  modified_base 1096: mod_base = OTHER; note = N1-methylpseudouridine
  modified_base 1097: mod_base = OTHER; note = N1-methylpseudouridine
  modified_base 1100: mod_base = OTHER; note = N1-methylpseudouridine
  modified_base 1103: mod_base = OTHER; note = N1-methylpseudouridine
  modified_base 1115: mod_base = OTHER; note = N1-methylpseudouridine
  modified_base 1136: mod_base = OTHER; note = N1-methylpseudouridine
  modified_base 1145: mod_base = OTHER; note = N1-methylpseudouridine
  modified_base 1147: mod_base = OTHER; note = N1-methylpseudouridine
  modified_base 1148: mod_base = OTHER; note = N1-methylpseudouridine
  modified_base 1151: mod_base = OTHER; note = N1-methylpseudouridine
  modified_base 1157: mod_base = OTHER; note = N1-methylpseudouridine
  modified_base 1160: mod_base = OTHER; note = N1-methylpseudouridine
  modified_base 1168: mod_base = OTHER; note = N1-methylpseudouridine
  modified_base 1178: mod_base = OTHER; note = N1-methylpseudouridine
  modified_base 1180: mod_base = OTHER; note = N1-methylpseudouridine
  modified_base 1181: mod_base = OTHER; note = N1-methylpseudouridine
  modified_base 1196: mod_base = OTHER; note = N1-methylpseudouridine
  modified_base 1211: mod_base = OTHER; note = N1-methylpseudouridine
  modified_base 1226: mod_base = OTHER; note = N1-methylpseudouridine
  modified_base 1229: mod_base = OTHER; note = N1-methylpseudouridine
  modified_base 1241: mod_base = OTHER; note = N1-methylpseudouridine
  modified_base 1259: mod_base = OTHER; note = N1-methylpseudouridine
  modified_base 1268: mod_base = OTHER; note = N1-methylpseudouridine
  modified_base 1271: mod_base = OTHER; note = N1-methylpseudouridine
  modified_base 1280: mod_base = OTHER; note = N1-methylpseudouridine
  modified_base 1304: mod_base = OTHER; note = N1-methylpseudouridine
  modified_base 1306: mod_base = OTHER; note = N1-methylpseudouridine
  modified_base 1307: mod_base = OTHER; note = N1-methylpseudouridine
  modified_base 1316: mod_base = OTHER; note = N1-methylpseudouridine
  modified_base 1319: mod_base = OTHER; note = N1-methylpseudouridine
  modified_base 1325: mod_base = OTHER; note = N1-methylpseudouridine
  modified_base 1331: mod_base = OTHER; note = N1-methylpseudouridine
  modified_base 1337: mod_base = OTHER; note = N1-methylpseudouridine
  modified_base 1348: mod_base = OTHER; note = N1-methylpseudouridine
  modified_base 1349: mod_base = OTHER; note = N1-methylpseudouridine
  modified_base 1360: mod_base = OTHER; note = N1-methylpseudouridine
  modified_base 1361: mod_base = OTHER; note = N1-methylpseudouridine
  modified_base 1367: mod_base = OTHER; note = N1-methylpseudouridine
  modified_base 1385: mod_base = OTHER; note = N1-methylpseudouridine
  modified_base 1391: mod_base = OTHER; note = N1-methylpseudouridine
  modified_base 1405: mod_base = OTHER; note = N1-methylpseudouridine
  modified_base 1418: mod_base = OTHER; note = N1-methylpseudouridine
  modified_base 1427: mod_base = OTHER; note = N1-methylpseudouridine
  modified_base 1430: mod_base = OTHER; note = N1-methylpseudouridine
  modified_base 1439: mod_base = OTHER; note = N1-methylpseudouridine
  modified_base 1450: mod_base = OTHER; note = N1-methylpseudouridine
  modified_base 1460: mod_base = OTHER; note = N1-methylpseudouridine
  modified_base 1462: mod_base = OTHER; note = N1-methylpseudouridine
  modified_base 1463: mod_base = OTHER; note = N1-methylpseudouridine
  modified_base 1466: mod_base = OTHER; note = N1-methylpseudouridine
  modified_base 1481: mod_base = OTHER; note = N1-methylpseudouridine
  modified_base 1493: mod_base = OTHER; note = N1-methylpseudouridine
  modified_base 1496: mod_base = OTHER; note = N1-methylpseudouridine
  modified_base 1499: mod_base = OTHER; note = N1-methylpseudouridine
  modified_base 1508: mod_base = OTHER; note = N1-methylpseudouridine
  modified_base 1511: mod_base = OTHER; note = N1-methylpseudouridine
  modified_base 1517: mod_base = OTHER; note = N1-methylpseudouridine
  modified_base 1529: mod_base = OTHER; note = N1-methylpseudouridine
  modified_base 1544: mod_base = OTHER; note = N1-methylpseudouridine
  modified_base 1556: mod_base = OTHER; note = N1-methylpseudouridine
  modified_base 1559: mod_base = OTHER; note = N1-methylpseudouridine
  modified_base 1567: mod_base = OTHER; note = N1-methylpseudouridine
  modified_base 1589: mod_base = OTHER; note = N1-methylpseudouridine
  modified_base 1595: mod_base = OTHER; note = N1-methylpseudouridine
  modified_base 1598: mod_base = OTHER; note = N1-methylpseudouridine
  modified_base 1607: mod_base = OTHER; note = N1-methylpseudouridine
  modified_base 1610: mod_base = OTHER; note = N1-methylpseudouridine
  modified_base 1622: mod_base = OTHER; note = N1-methylpseudouridine
  modified_base 1633: mod_base = OTHER; note = N1-methylpseudouridine
  modified_base 1643: mod_base = OTHER; note = N1-methylpseudouridine
  modified_base 1645: mod_base = OTHER; note = N1-methylpseudouridine
  modified_base 1646: mod_base = OTHER; note = N1-methylpseudouridine
  modified_base 1648: mod_base = OTHER; note = N1-methylpseudouridine
  modified_base 1649: mod_base = OTHER; note = N1-methylpseudouridine
  modified_base 1669: mod_base = OTHER; note = N1-methylpseudouridine
  modified_base 1678: mod_base = OTHER; note = N1-methylpseudouridine
  modified_base 1682: mod_base = OTHER; note = N1-methylpseudouridine
  modified_base 1708: mod_base = OTHER; note = N1-methylpseudouridine
  modified_base 1709: mod_base = OTHER; note = N1-methylpseudouridine
  modified_base 1711: mod_base = OTHER; note = N1-methylpseudouridine
  modified_base 1717: mod_base = OTHER; note = N1-methylpseudouridine
  modified_base 1718: mod_base = OTHER; note = N1-methylpseudouridine
  modified_base 1721: mod_base = OTHER; note = N1-methylpseudouridine
  modified_base 1730: mod_base = OTHER; note = N1-methylpseudouridine
  modified_base 1733: mod_base = OTHER; note = N1-methylpseudouridine
  modified_base 1742: mod_base = OTHER; note = N1-methylpseudouridine
  modified_base 1760: mod_base = OTHER; note = N1-methylpseudouridine
  modified_base 1763: mod_base = OTHER; note = N1-methylpseudouridine
  modified_base 1766: mod_base = OTHER; note = N1-methylpseudouridine
  modified_base 1772: mod_base = OTHER; note = N1-methylpseudouridine
  modified_base 1787: mod_base = OTHER; note = N1-methylpseudouridine
  modified_base 1790: mod_base = OTHER; note = N1-methylpseudouridine
  modified_base 1807: mod_base = OTHER; note = N1-methylpseudouridine
  modified_base 1808: mod_base = OTHER; note = N1-methylpseudouridine
  modified_base 1823: mod_base = OTHER; note = N1-methylpseudouridine
  modified_base 1835: mod_base = OTHER; note = N1-methylpseudouridine
  modified_base 1841: mod_base = OTHER; note = N1-methylpseudouridine
  modified_base 1850: mod_base = OTHER; note = N1-methylpseudouridine
  modified_base 1859: mod_base = OTHER; note = N1-methylpseudouridine
  modified_base 1862: mod_base = OTHER; note = N1-methylpseudouridine
  modified_base 1879: mod_base = OTHER; note = N1-methylpseudouridine
  modified_base 1880: mod_base = OTHER; note = N1-methylpseudouridine
  modified_base 1882: mod_base = OTHER; note = N1-methylpseudouridine
  modified_base 1888: mod_base = OTHER; note = N1-methylpseudouridine
  modified_base 1889: mod_base = OTHER; note = N1-methylpseudouridine
  modified_base 1892: mod_base = OTHER; note = N1-methylpseudouridine
  modified_base 1913: mod_base = OTHER; note = N1-methylpseudouridine
  modified_base 1922: mod_base = OTHER; note = N1-methylpseudouridine
  modified_base 1925: mod_base = OTHER; note = N1-methylpseudouridine
  modified_base 1930: mod_base = OTHER; note = N1-methylpseudouridine
  modified_base 1931: mod_base = OTHER; note = N1-methylpseudouridine
  modified_base 1937: mod_base = OTHER; note = N1-methylpseudouridine
  modified_base 1942: mod_base = OTHER; note = N1-methylpseudouridine
  modified_base 1945: mod_base = OTHER; note = N1-methylpseudouridine
  modified_base 1949: mod_base = OTHER; note = N1-methylpseudouridine
  modified_base 1958: mod_base = OTHER; note = N1-methylpseudouridine
  modified_base 1978: mod_base = OTHER; note = N1-methylpseudouridine
  modified_base 1979: mod_base = OTHER; note = N1-methylpseudouridine
  modified_base 1984: mod_base = OTHER; note = N1-methylpseudouridine
  modified_base 1988: mod_base = OTHER; note = N1-methylpseudouridine
  modified_base 2012: mod_base = OTHER; note = N1-methylpseudouridine
  modified_base 2020: mod_base = OTHER; note = N1-methylpseudouridine
  modified_base 2026: mod_base = OTHER; note = N1-methylpseudouridine
  modified_base 2027: mod_base = OTHER; note = N1-methylpseudouridine
  modified_base 2036: mod_base = OTHER; note = N1-methylpseudouridine
  modified_base 2039: mod_base = OTHER; note = N1-methylpseudouridine
  modified_base 2065: mod_base = OTHER; note = N1-methylpseudouridine
  modified_base 2066: mod_base = OTHER; note = N1-methylpseudouridine
  modified_base 2069: mod_base = OTHER; note = N1-methylpseudouridine
  modified_base 2078: mod_base = OTHER; note = N1-methylpseudouridine
  modified_base 2086: mod_base = OTHER; note = N1-methylpseudouridine
  modified_base 2087: mod_base = OTHER; note = N1-methylpseudouridine
  modified_base 2099: mod_base = OTHER; note = N1-methylpseudouridine
  modified_base 2114: mod_base = OTHER; note = N1-methylpseudouridine
  modified_base 2117: mod_base = OTHER; note = N1-methylpseudouridine
  modified_base 2132: mod_base = OTHER; note = N1-methylpseudouridine
  modified_base 2135: mod_base = OTHER; note = N1-methylpseudouridine
  modified_base 2137: mod_base = OTHER; note = N1-methylpseudouridine
  modified_base 2143: mod_base = OTHER; note = N1-methylpseudouridine
  modified_base 2146: mod_base = OTHER; note = N1-methylpseudouridine
  modified_base 2147: mod_base = OTHER; note = N1-methylpseudouridine
  modified_base 2153: mod_base = OTHER; note = N1-methylpseudouridine
  modified_base 2155: mod_base = OTHER; note = N1-methylpseudouridine
  modified_base 2165: mod_base = OTHER; note = N1-methylpseudouridine
  modified_base 2174: mod_base = OTHER; note = N1-methylpseudouridine
  modified_base 2179: mod_base = OTHER; note = N1-methylpseudouridine
  modified_base 2183: mod_base = OTHER; note = N1-methylpseudouridine
  modified_base 2195: mod_base = OTHER; note = N1-methylpseudouridine
  modified_base 2209: mod_base = OTHER; note = N1-methylpseudouridine
  modified_base 2210: mod_base = OTHER; note = N1-methylpseudouridine
  modified_base 2213: mod_base = OTHER; note = N1-methylpseudouridine
  modified_base 2237: mod_base = OTHER; note = N1-methylpseudouridine
  modified_base 2240: mod_base = OTHER; note = N1-methylpseudouridine
  modified_base 2246: mod_base = OTHER; note = N1-methylpseudouridine
  modified_base 2249: mod_base = OTHER; note = N1-methylpseudouridine
  modified_base 2251: mod_base = OTHER; note = N1-methylpseudouridine
  modified_base 2252: mod_base = OTHER; note = N1-methylpseudouridine
  modified_base 2270: mod_base = OTHER; note = N1-methylpseudouridine
  modified_base 2276: mod_base = OTHER; note = N1-methylpseudouridine
  modified_base 2285: mod_base = OTHER; note = N1-methylpseudouridine
  modified_base 2296: mod_base = OTHER; note = N1-methylpseudouridine
  modified_base 2299: mod_base = OTHER; note = N1-methylpseudouridine
  modified_base 2300: mod_base = OTHER; note = N1-methylpseudouridine
  modified_base 2309: mod_base = OTHER; note = N1-methylpseudouridine
  modified_base 2314: mod_base = OTHER; note = N1-methylpseudouridine
  modified_base 2317: mod_base = OTHER; note = N1-methylpseudouridine
  modified_base 2318: mod_base = OTHER; note = N1-methylpseudouridine
  modified_base 2327: mod_base = OTHER; note = N1-methylpseudouridine
  modified_base 2333: mod_base = OTHER; note = N1-methylpseudouridine
  modified_base 2342: mod_base = OTHER; note = N1-methylpseudouridine
  modified_base 2353: mod_base = OTHER; note = N1-methylpseudouridine
  modified_base 2354: mod_base = OTHER; note = N1-methylpseudouridine
  modified_base 2366: mod_base = OTHER; note = N1-methylpseudouridine
  modified_base 2374: mod_base = OTHER; note = N1-methylpseudouridine
  modified_base 2384: mod_base = OTHER; note = N1-methylpseudouridine
  modified_base 2387: mod_base = OTHER; note = N1-methylpseudouridine
  modified_base 2393: mod_base = OTHER; note = N1-methylpseudouridine
  modified_base 2396: mod_base = OTHER; note = N1-methylpseudouridine
  modified_base 2410: mod_base = OTHER; note = N1-methylpseudouridine
  modified_base 2411: mod_base = OTHER; note = N1-methylpseudouridine
  modified_base 2414: mod_base = OTHER; note = N1-methylpseudouridine
  modified_base 2438: mod_base = OTHER; note = N1-methylpseudouridine
  modified_base 2441: mod_base = OTHER; note = N1-methylpseudouridine
  modified_base 2450: mod_base = OTHER; note = N1-methylpseudouridine
  modified_base 2453: mod_base = OTHER; note = N1-methylpseudouridine
  modified_base 2456: mod_base = OTHER; note = N1-methylpseudouridine
  modified_base 2462: mod_base = OTHER; note = N1-methylpseudouridine
  modified_base 2468: mod_base = OTHER; note = N1-methylpseudouridine
  modified_base 2470: mod_base = OTHER; note = N1-methylpseudouridine
  modified_base 2471: mod_base = OTHER; note = N1-methylpseudouridine
  modified_base 2486: mod_base = OTHER; note = N1-methylpseudouridine
  modified_base 2489: mod_base = OTHER; note = N1-methylpseudouridine
  modified_base 2501: mod_base = OTHER; note = N1-methylpseudouridine
  modified_base 2509: mod_base = OTHER; note = N1-methylpseudouridine
  modified_base 2519: mod_base = OTHER; note = N1-methylpseudouridine
  modified_base 2521: mod_base = OTHER; note = N1-methylpseudouridine
  modified_base 2522: mod_base = OTHER; note = N1-methylpseudouridine
  modified_base 2534: mod_base = OTHER; note = N1-methylpseudouridine
  modified_base 2537: mod_base = OTHER; note = N1-methylpseudouridine
  modified_base 2546: mod_base = OTHER; note = N1-methylpseudouridine
  modified_base 2560: mod_base = OTHER; note = N1-methylpseudouridine
  modified_base 2569: mod_base = OTHER; note = N1-methylpseudouridine
  modified_base 2579: mod_base = OTHER; note = N1-methylpseudouridine
  modified_base 2591: mod_base = OTHER; note = N1-methylpseudouridine
  modified_base 2594: mod_base = OTHER; note = N1-methylpseudouridine
  modified_base 2603: mod_base = OTHER; note = N1-methylpseudouridine
  modified_base 2630: mod_base = OTHER; note = N1-methylpseudouridine
  modified_base 2633: mod_base = OTHER; note = N1-methylpseudouridine
  modified_base 2638: mod_base = OTHER; note = N1-methylpseudouridine
  modified_base 2639: mod_base = OTHER; note = N1-methylpseudouridine
  modified_base 2642: mod_base = OTHER; note = N1-methylpseudouridine
  modified_base 2656: mod_base = OTHER; note = N1-methylpseudouridine
  modified_base 2657: mod_base = OTHER; note = N1-methylpseudouridine
  modified_base 2671: mod_base = OTHER; note = N1-methylpseudouridine
  modified_base 2672: mod_base = OTHER; note = N1-methylpseudouridine
  modified_base 2675: mod_base = OTHER; note = N1-methylpseudouridine
  modified_base 2681: mod_base = OTHER; note = N1-methylpseudouridine
  modified_base 2684: mod_base = OTHER; note = N1-methylpseudouridine
  modified_base 2699: mod_base = OTHER; note = N1-methylpseudouridine
  modified_base 2704: mod_base = OTHER; note = N1-methylpseudouridine
  modified_base 2705: mod_base = OTHER; note = N1-methylpseudouridine
  modified_base 2717: mod_base = OTHER; note = N1-methylpseudouridine
  modified_base 2732: mod_base = OTHER; note = N1-methylpseudouridine
  modified_base 2753: mod_base = OTHER; note = N1-methylpseudouridine
  modified_base 2765: mod_base = OTHER; note = N1-methylpseudouridine
  modified_base 2774: mod_base = OTHER; note = N1-methylpseudouridine
  modified_base 2792: mod_base = OTHER; note = N1-methylpseudouridine
  modified_base 2804: mod_base = OTHER; note = N1-methylpseudouridine
  modified_base 2807: mod_base = OTHER; note = N1-methylpseudouridine
  modified_base 2816: mod_base = OTHER; note = N1-methylpseudouridine
  modified_base 2822: mod_base = OTHER; note = N1-methylpseudouridine
  modified_base 2825: mod_base = OTHER; note = N1-methylpseudouridine
  modified_base 2834: mod_base = OTHER; note = N1-methylpseudouridine
  modified_base 2837: mod_base = OTHER; note = N1-methylpseudouridine
  modified_base 2843: mod_base = OTHER; note = N1-methylpseudouridine
  modified_base 2846: mod_base = OTHER; note = N1-methylpseudouridine
  modified_base 2870: mod_base = OTHER; note = N1-methylpseudouridine
  modified_base 2873: mod_base = OTHER; note = N1-methylpseudouridine
  modified_base 2876: mod_base = OTHER; note = N1-methylpseudouridine
  modified_base 2882: mod_base = OTHER; note = N1-methylpseudouridine
  modified_base 2936: mod_base = OTHER; note = N1-methylpseudouridine
  modified_base 2945: mod_base = OTHER; note = N1-methylpseudouridine
  modified_base 2957: mod_base = OTHER; note = N1-methylpseudouridine
  modified_base 2966: mod_base = OTHER; note = N1-methylpseudouridine
  modified_base 2978: mod_base = OTHER; note = N1-methylpseudouridine
  modified_base 2981: mod_base = OTHER; note = N1-methylpseudouridine
  modified_base 2996: mod_base = OTHER; note = N1-methylpseudouridine
  modified_base 3011: mod_base = OTHER; note = N1-methylpseudouridine
  modified_base 3026: mod_base = OTHER; note = N1-methylpseudouridine
  modified_base 3028: mod_base = OTHER; note = N1-methylpseudouridine
  modified_base 3032: mod_base = OTHER; note = N1-methylpseudouridine
  modified_base 3034: mod_base = OTHER; note = N1-methylpseudouridine
  modified_base 3037: mod_base = OTHER; note = N1-methylpseudouridine
  modified_base 3041: mod_base = OTHER; note = N1-methylpseudouridine
  modified_base 3059: mod_base = OTHER; note = N1-methylpseudouridine
  modified_base 3061: mod_base = OTHER; note = N1-methylpseudouridine
  modified_base 3065: mod_base = OTHER; note = N1-methylpseudouridine
  modified_base 3077: mod_base = OTHER; note = N1-methylpseudouridine
  modified_base 3083: mod_base = OTHER; note = N1-methylpseudouridine
  modified_base 3092: mod_base = OTHER; note = N1-methylpseudouridine
  modified_base 3100: mod_base = OTHER; note = N1-methylpseudouridine
  modified_base 3107: mod_base = OTHER; note = N1-methylpseudouridine
  modified_base 3116: mod_base = OTHER; note = N1-methylpseudouridine
  modified_base 3119: mod_base = OTHER; note = N1-methylpseudouridine
  modified_base 3130: mod_base = OTHER; note = N1-methylpseudouridine
  modified_base 3131: mod_base = OTHER; note = N1-methylpseudouridine
  modified_base 3134: mod_base = OTHER; note = N1-methylpseudouridine
  modified_base 3149: mod_base = OTHER; note = N1-methylpseudouridine
  modified_base 3161: mod_base = OTHER; note = N1-methylpseudouridine
  modified_base 3164: mod_base = OTHER; note = N1-methylpseudouridine
  modified_base 3203: mod_base = OTHER; note = N1-methylpseudouridine
  modified_base 3218: mod_base = OTHER; note = N1-methylpseudouridine
  modified_base 3221: mod_base = OTHER; note = N1-methylpseudouridine
  modified_base 3230: mod_base = OTHER; note = N1-methylpseudouridine
  modified_base 3238: mod_base = OTHER; note = N1-methylpseudouridine
  modified_base 3241: mod_base = OTHER; note = N1-methylpseudouridine
  modified_base 3251: mod_base = OTHER; note = N1-methylpseudouridine
  modified_base 3254: mod_base = OTHER; note = N1-methylpseudouridine
  modified_base 3266: mod_base = OTHER; note = N1-methylpseudouridine
  modified_base 3269: mod_base = OTHER; note = N1-methylpseudouridine
  modified_base 3283: mod_base = OTHER; note = N1-methylpseudouridine
  modified_base 3284: mod_base = OTHER; note = N1-methylpseudouridine
  modified_base 3293: mod_base = OTHER; note = N1-methylpseudouridine
  modified_base 3317: mod_base = OTHER; note = N1-methylpseudouridine
  modified_base 3326: mod_base = OTHER; note = N1-methylpseudouridine
  modified_base 3340: mod_base = OTHER; note = N1-methylpseudouridine
  modified_base 3341: mod_base = OTHER; note = N1-methylpseudouridine
  modified_base 3344: mod_base = OTHER; note = N1-methylpseudouridine
  modified_base 3356: mod_base = OTHER; note = N1-methylpseudouridine
  modified_base 3359: mod_base = OTHER; note = N1-methylpseudouridine
  modified_base 3374: mod_base = OTHER; note = N1-methylpseudouridine
  modified_base 3386: mod_base = OTHER; note = N1-methylpseudouridine
  modified_base 3395: mod_base = OTHER; note = N1-methylpseudouridine
  modified_base 3398: mod_base = OTHER; note = N1-methylpseudouridine
  modified_base 3410: mod_base = OTHER; note = N1-methylpseudouridine
  modified_base 3421: mod_base = OTHER; note = N1-methylpseudouridine
  modified_base 3440: mod_base = OTHER; note = N1-methylpseudouridine
  modified_base 3443: mod_base = OTHER; note = N1-methylpseudouridine
  modified_base 3452: mod_base = OTHER; note = N1-methylpseudouridine
  modified_base 3458: mod_base = OTHER; note = N1-methylpseudouridine
  modified_base 3461: mod_base = OTHER; note = N1-methylpseudouridine
  modified_base 3467: mod_base = OTHER; note = N1-methylpseudouridine
  modified_base 3479: mod_base = OTHER; note = N1-methylpseudouridine
  modified_base 3482: mod_base = OTHER; note = N1-methylpseudouridine
  modified_base 3490: mod_base = OTHER; note = N1-methylpseudouridine
  modified_base 3491: mod_base = OTHER; note = N1-methylpseudouridine
  modified_base 3502: mod_base = OTHER; note = N1-methylpseudouridine
  modified_base 3503: mod_base = OTHER; note = N1-methylpseudouridine
  modified_base 3508: mod_base = OTHER; note = N1-methylpseudouridine
  modified_base 3509: mod_base = OTHER; note = N1-methylpseudouridine
  modified_base 3511: mod_base = OTHER; note = N1-methylpseudouridine
  modified_base 3518: mod_base = OTHER; note = N1-methylpseudouridine
  modified_base 3527: mod_base = OTHER; note = N1-methylpseudouridine
  modified_base 3535: mod_base = OTHER; note = N1-methylpseudouridine
  modified_base 3556: mod_base = OTHER; note = N1-methylpseudouridine
  modified_base 3560: mod_base = OTHER; note = N1-methylpseudouridine
  modified_base 3569: mod_base = OTHER; note = N1-methylpseudouridine
  modified_base 3572: mod_base = OTHER; note = N1-methylpseudouridine
  modified_base 3584: mod_base = OTHER; note = N1-methylpseudouridine
  modified_base 3587: mod_base = OTHER; note = N1-methylpseudouridine
  modified_base 3595: mod_base = OTHER; note = N1-methylpseudouridine
  modified_base 3605: mod_base = OTHER; note = N1-methylpseudouridine
  modified_base 3616: mod_base = OTHER; note = N1-methylpseudouridine
  modified_base 3617: mod_base = OTHER; note = N1-methylpseudouridine
  modified_base 3620: mod_base = OTHER; note = N1-methylpseudouridine
  modified_base 3622: mod_base = OTHER; note = N1-methylpseudouridine
  modified_base 3631: mod_base = OTHER; note = N1-methylpseudouridine
  modified_base 3638: mod_base = OTHER; note = N1-methylpseudouridine
  modified_base 3640: mod_base = OTHER; note = N1-methylpseudouridine
  modified_base 3647: mod_base = OTHER; note = N1-methylpseudouridine
  modified_base 3656: mod_base = OTHER; note = N1-methylpseudouridine
  modified_base 3659: mod_base = OTHER; note = N1-methylpseudouridine
  modified_base 3680: mod_base = OTHER; note = N1-methylpseudouridine
  modified_base 3700: mod_base = OTHER; note = N1-methylpseudouridine
  modified_base 3703: mod_base = OTHER; note = N1-methylpseudouridine
  modified_base 3704: mod_base = OTHER; note = N1-methylpseudouridine
  modified_base 3706: mod_base = OTHER; note = N1-methylpseudouridine
  modified_base 3707: mod_base = OTHER; note = N1-methylpseudouridine
  modified_base 3709: mod_base = OTHER; note = N1-methylpseudouridine
  modified_base 3719: mod_base = OTHER; note = N1-methylpseudouridine
  modified_base 3722: mod_base = OTHER; note = N1-methylpseudouridine
  modified_base 3727: mod_base = OTHER; note = N1-methylpseudouridine
  modified_base 3728: mod_base = OTHER; note = N1-methylpseudouridine
  modified_base 3730: mod_base = OTHER; note = N1-methylpseudouridine
  modified_base 3731: mod_base = OTHER; note = N1-methylpseudouridine
  modified_base 3743: mod_base = OTHER; note = N1-methylpseudouridine
  modified_base 3749: mod_base = OTHER; note = N1-methylpseudouridine
  modified_base 3764: mod_base = OTHER; note = N1-methylpseudouridine
  modified_base 3779: mod_base = OTHER; note = N1-methylpseudouridine
  modified_base 3782: mod_base = OTHER; note = N1-methylpseudouridine
  modified_base 3809: mod_base = OTHER; note = N1-methylpseudouridine
  modified_base 3812: mod_base = OTHER; note = N1-methylpseudouridine
  modified_base 3814: mod_base = OTHER; note = N1-methylpseudouridine
  modified_base 3832: mod_base = OTHER; note = N1-methylpseudouridine
  modified_base 3833: mod_base = OTHER; note = N1-methylpseudouridine
  modified_base 3842: mod_base = OTHER; note = N1-methylpseudouridine
  modified_base 3851: mod_base = OTHER; note = N1-methylpseudouridine
  modified_base 3854: mod_base = OTHER; note = N1-methylpseudouridine
  modified_base 3860: mod_base = OTHER; note = N1-methylpseudouridine
  modified_base 3869: mod_base = OTHER; note = N1-methylpseudouridine
  modified_base 3875: mod_base = OTHER; note = N1-methylpseudouridine
  modified_base 3878: mod_base = OTHER; note = N1-methylpseudouridine
  modified_base 3893: mod_base = OTHER; note = N1-methylpseudouridine
  modified_base 3907: mod_base = OTHER; note = N1-methylpseudouridine
  modified_base 3908: mod_base = OTHER; note = N1-methylpseudouridine
  modified_base 3923: mod_base = OTHER; note = N1-methylpseudouridine
  modified_base 3926: mod_base = OTHER; note = N1-methylpseudouridine
  modified_base 3950: mod_base = OTHER; note = N1-methylpseudouridine
  modified_base 3953: mod_base = OTHER; note = N1-methylpseudouridine
  modified_base 3970: mod_base = OTHER; note = N1-methylpseudouridine
  modified_base 3985: mod_base = OTHER; note = N1-methylpseudouridine
  modified_base 3994: mod_base = OTHER; note = N1-methylpseudouridine
  modified_base 3995: mod_base = OTHER; note = N1-methylpseudouridine
  modified_base 4010: mod_base = OTHER; note = N1-methylpseudouridine
  modified_base 4015: mod_base = OTHER; note = N1-methylpseudouridine
  modified_base 4022: mod_base = OTHER; note = N1-methylpseudouridine
  modified_base 4025: mod_base = OTHER; note = N1-methylpseudouridine
  modified_base 4028: mod_base = OTHER; note = N1-methylpseudouridine
  modified_base 4031: mod_base = OTHER; note = N1-methylpseudouridine
  modified_base 4040: mod_base = OTHER; note = N1-methylpseudouridine
  modified_base 4064: mod_base = OTHER; note = N1-methylpseudouridine
  modified_base 4073: mod_base = OTHER; note = N1-methylpseudouridine
  modified_base 4082: mod_base = OTHER; note = N1-methylpseudouridine
  modified_base 4085: mod_base = OTHER; note = N1-methylpseudouridine
  modified_base 4091: mod_base = OTHER; note = N1-methylpseudouridine
  modified_base 4097: mod_base = OTHER; note = N1-methylpseudouridine
  modified_base 4100: mod_base = OTHER; note = N1-methylpseudouridine
  modified_base 4114: mod_base = OTHER; note = N1-methylpseudouridine
  modified_base 4115: mod_base = OTHER; note = N1-methylpseudouridine
  modified_base 4130: mod_base = OTHER; note = N1-methylpseudouridine
  modified_base 4135: mod_base = OTHER; note = N1-methylpseudouridine
  modified_base 4136: mod_base = OTHER; note = N1-methylpseudouridine
  modified_base 4139: mod_base = OTHER; note = N1-methylpseudouridine
  modified_base 4153: mod_base = OTHER; note = N1-methylpseudouridine
  modified_base 4163: mod_base = OTHER; note = N1-methylpseudouridine
  modified_base 4175: mod_base = OTHER; note = N1-methylpseudouridine
  modified_base 4178: mod_base = OTHER; note = N1-methylpseudouridine
  modified_base 4181: mod_base = OTHER; note = N1-methylpseudouridine
  modified_base 4187: mod_base = OTHER; note = N1-methylpseudouridine
  modified_base 4195: mod_base = OTHER; note = N1-methylpseudouridine
  modified_base 4202: mod_base = OTHER; note = N1-methylpseudouridine
  modified_base 4204: mod_base = OTHER; note = N1-methylpseudouridine
  modified_base 4205: mod_base = OTHER; note = N1-methylpseudouridine
  modified_base 4211: mod_base = OTHER; note = N1-methylpseudouridine
  modified_base 4232: mod_base = OTHER; note = N1-methylpseudouridine
  modified_base 4235: mod_base = OTHER; note = N1-methylpseudouridine
  modified_base 4253: mod_base = OTHER; note = N1-methylpseudouridine
  modified_base 4271: mod_base = OTHER; note = N1-methylpseudouridine
  modified_base 4277: mod_base = OTHER; note = N1-methylpseudouridine
  modified_base 4288: mod_base = OTHER; note = N1-methylpseudouridine
  modified_base 4292: mod_base = OTHER; note = N1-methylpseudouridine
  modified_base 4297: mod_base = OTHER; note = N1-methylpseudouridine
  modified_base 4298: mod_base = OTHER; note = N1-methylpseudouridine
  modified_base 4301: mod_base = OTHER; note = N1-methylpseudouridine
  modified_base 4303: mod_base = OTHER; note = N1-methylpseudouridine
  modified_base 4307: mod_base = OTHER; note = N1-methylpseudouridine
  modified_base 4318: mod_base = OTHER; note = N1-methylpseudouridine
  modified_base 4328: mod_base = OTHER; note = N1-methylpseudouridine
  modified_base 4364: mod_base = OTHER; note = N1-methylpseudouridine
  modified_base 4366: mod_base = OTHER; note = N1-methylpseudouridine
  modified_base 4367: mod_base = OTHER; note = N1-methylpseudouridine
  modified_base 4370: mod_base = OTHER; note = N1-methylpseudouridine
  modified_base 4387: mod_base = OTHER; note = N1-methylpseudouridine
  modified_base 4391: mod_base = OTHER; note = N1-methylpseudouridine
  modified_base 4400: mod_base = OTHER; note = N1-methylpseudouridine
  modified_base 4403: mod_base = OTHER; note = N1-methylpseudouridine
  modified_base 4412: mod_base = OTHER; note = N1-methylpseudouridine
  modified_base 4420: mod_base = OTHER; note = N1-methylpseudouridine
  modified_base 4421: mod_base = OTHER; note = N1-methylpseudouridine
  modified_base 4433: mod_base = OTHER; note = N1-methylpseudouridine
  modified_base 4436: mod_base = OTHER; note = N1-methylpseudouridine
  modified_base 4439: mod_base = OTHER; note = N1-methylpseudouridine
  modified_base 4454: mod_base = OTHER; note = N1-methylpseudouridine
  modified_base 4463: mod_base = OTHER; note = N1-methylpseudouridine
  modified_base 4466: mod_base = OTHER; note = N1-methylpseudouridine
  modified_base 4474: mod_base = OTHER; note = N1-methylpseudouridine
  modified_base 4499: mod_base = OTHER; note = N1-methylpseudouridine
  modified_base 4520: mod_base = OTHER; note = N1-methylpseudouridine
  modified_base 4523: mod_base = OTHER; note = N1-methylpseudouridine
  modified_base 4529: mod_base = OTHER; note = N1-methylpseudouridine
  modified_base 4531: mod_base = OTHER; note = N1-methylpseudouridine
  modified_base 4532: mod_base = OTHER; note = N1-methylpseudouridine
  modified_base 4538: mod_base = OTHER; note = N1-methylpseudouridine
  modified_base 4547: mod_base = OTHER; note = N1-methylpseudouridine
  modified_base 4564: mod_base = OTHER; note = N1-methylpseudouridine
  modified_base 4565: mod_base = OTHER; note = N1-methylpseudouridine
  modified_base 4570: mod_base = OTHER; note = N1-methylpseudouridine
  modified_base 4573: mod_base = OTHER; note = N1-methylpseudouridine
  modified_base 4574: mod_base = OTHER; note = N1-methylpseudouridine
  modified_base 4586: mod_base = OTHER; note = N1-methylpseudouridine
  modified_base 4600: mod_base = OTHER; note = N1-methylpseudouridine
  modified_base 4619: mod_base = OTHER; note = N1-methylpseudouridine
  modified_base 4622: mod_base = OTHER; note = N1-methylpseudouridine
  modified_base 4634: mod_base = OTHER; note = N1-methylpseudouridine
  modified_base 4637: mod_base = OTHER; note = N1-methylpseudouridine
  modified_base 4649: mod_base = OTHER; note = N1-methylpseudouridine
  modified_base 4658: mod_base = OTHER; note = N1-methylpseudouridine
  modified_base 4660: mod_base = OTHER; note = N1-methylpseudouridine
  modified_base 4673: mod_base = OTHER; note = N1-methylpseudouridine
  modified_base 4679: mod_base = OTHER; note = N1-methylpseudouridine
  modified_base 4688: mod_base = OTHER; note = N1-methylpseudouridine
  modified_base 4735: mod_base = OTHER; note = N1-methylpseudouridine
  modified_base 4736: mod_base = OTHER; note = N1-methylpseudouridine
  modified_base 4763: mod_base = OTHER; note = N1-methylpseudouridine
  modified_base 4765: mod_base = OTHER; note = N1-methylpseudouridine
atgagcgaggtggagttcagccacgagtactggatgcggcacgccctgaccctggccaagcgggcccgggacgagcgggaggtgcccgtgggcgccgtgctggtgctgaacaaccgggtgatcggcgagggctggaaccgggccatcggcctgcacgaccccaccgcccacgccgagatcatggccctgcggcagggcggcctggtgatgcagaactaccggctgatcgacgccaccctgtacgtgaccttcgagccctgcgtgatgtgcgccggcgccatgatccacagccggatcggccgggtggtgttcggcgtgcggaacgccaagaccggcgccgccggcagcctgatggacgtgctgcaccaccccggcatgaaccaccgggtggagatcaccgagggcatcctggccgacgagtgcgccgccctgctgtgccggttcttccggatgccccggcgggtgttcaacgcccagaagaaggcccagagcagcaccgacagcggcggcagcagcggcggcagcagcggcagcgagacacccggcaccagcgagagcgccacccccgagagcagcggcggcagcagcggcggcagcgacaagaagtacagcatcggcctggccatcggcaccaacagcgtgggctgggccgtgatcaccgacgagtacaaggtgcccagcaagaagttcaaggtgctgggcaacaccgaccggcacagcatcaagaagaacctgatcggcgccctgctgttcgacagcggcgagacagccgaggccacccggctgaagcggaccgcccggcggcggtacacccggcggaagaaccggatctgctacctgcaggagatcttcagcaacgagatggccaaggtggacgacagcttcttccaccggctggaggagagcttcctggtggaggaggacaagaagcacgagcggcaccccatcttcggcaacatcgtggacgaggtggcctaccacgagaagtaccccaccatctaccacctgcggaagaagctggtggacagcaccgacaaggccgacctgcggctgatctacctggccctggcccacatgatcaagttccggggccacttcctgatcgagggcgacctgaaccccgacaacagcgacgtggacaagctgttcatccagctggtgcagacctacaaccagctgttcgaggagaaccccatcaacgccagcggcgtggacgccaaggccatcctgagcgcccggctgagcaagagccggcggctggagaacctgatcgcccagctgcccggcgagaagaagaacggcctgttcggcaacctgatcgccctgagcctgggcctgacccccaacttcaagagcaacttcgacctggccgaggacgccaagctgcagctgagcaaggacacctacgacgacgacctggacaacctgctggcccagatcggcgaccagtacgccgacctgttcctggccgccaagaacctgagcgacgccatcctgctgagcgacatcctgcgggtgaacaccgagatcaccaaggcccccctgagcgccagcatgatcaagcggtacgacgagcaccaccaggacctgaccctgctgaaggccctggtgcggcagcagctgcccgagaagtacaaggagatcttcttcgaccagagcaagaacggctacgccggctacatcgacggcggcgccagccaggaggagttctacaagttcatcaagcccatcctggagaagatggacggcaccgaggagctgctggtgaagctgaaccgggaggacctgctgcggaagcagcggaccttcgacaacggcagcatcccccaccagatccacctgggcgagctgcacgccatcctgcggcggcaggaggacttctaccccttcctgaaggacaaccgggagaagatcgagaagatcctgaccttccggatcccctactacgtgggccccctggcccggggcaacagccggttcgcctggatgacccgcaagagcgaggagacaatcaccccctggaacttcgaggaggtggtggacaagggcgccagcgcccagagcttcatcgagcggatgaccaacttcgacaagaacctgcccaacgagaaggtgctgcccaagcacagcctgctgtacgagtacttcaccgtgtacaacgagctgaccaaggtgaagtacgtgaccgagggcatgcggaagcccgccttcctgagcggcgagcagaagaaggccatcgtggacctgctgttcaagaccaaccggaaggtgaccgtgaagcagctgaaggaggactacttcaagaagatcgagtgcttcgacagcgtggagatcagcggcgtggaggaccggttcaacgccagcctgggcacctaccacgacctgctgaagatcatcaaggacaaggacttcctggacaacgaggagaacgaggacatcctggaggacatcgtgctgaccctgaccctgttcgaggaccgggagatgatcgaggagcggctgaagacctacgcccacctgttcgacgacaaggtgatgaagcagctgaagcggcggcggtacaccggctggggccggctgagccggaagctgatcaacggcatccgggacaagcagagcggcaagaccatcctggacttcctcaagagcgacggcttcgccaaccggaacttcatgcagctgatccacgacgacagcctgaccttcaaggaggacatccagaaggcccaggtgagcggccagggcgacagcctgcacgagcacatcgccaacctggccggcagccccgccatcaagaagggcatcctgcagaccgtgaaggtggtggacgagctggtgaaggtgatgggccggcacaagcccgagaacatcgtgatcgagatggcccgggagaaccagaccacccagaagggccagaagaacagccgggagcggatgaagcggatcgaggagggcatcaaggagctgggcagccagatcctgaaggagcaccccgtggagaacacccagctgcagaacgaggccctgtacctgtactacctgcagaacggccgggacatgtacgtggaccaggagctggacatcaaccggctgagcgactacgacgtggaccacatcgtgccccagagcttcctgaaggacgacagcatcgacaacaaggtgctgacccggagcgacaagaaccggggcaagagcgacaacgtgcccagcgaggaggtggtgaagaagatgaagaactactggcggcagctgctgaacgccaagctgatcacccagcggaagttcgacaacctgaccaaggccgagcggggcggcctgagcgagctggacaaggccggcttcatcaagcggcagctggtggagacacggcagatcaccaagcacgtggcccagatcctggacagccggatgaacaccaagtacgacgagaacgacaagctgatccgggaggtgaaggtgatcaccctcaagagcaagctggtgagcgacttccggaaggacttccagttctacaaggtgcgggagatcaacaactaccaccacgcccacgacgcctacctgaacgccgtggtgggcaccgccctgatcaagaagtaccccgccctggagagcgagttcgtgtacggcgactacaaggtgtacgacgtgcggaagatgatcgccaagagcgagcaggagatcggcaaggccaccgccaagtacttcttctacagcaacatcatgaacttcttcaagaccgagatcaccctggccaacggcgagatccggaaggcccccctgatcgagacaaacggcgagacaggcgagatcgtgtgggacaagggccgggacttcgccaccgtgcggaaggtgctgagcatgccccaggtgaacatcgtgaagaagaccgaggtgcagaccggcggcttcagcaaggagagcatcctgcccaagcggaacagcgacaagctgatcgcccggaagaaggactgggaccccaagaagtacggcggcttcgacagccccaccgtggcctacagcgtgctggtggtggccaaggtggagaagggcaagagcaagaagctcaagagcgtgaaggagctgctgggcatcaccatcatggagcggagcagcttcgagaagaaccccatcgacttcctggaggccaagggctacaaggaggtgaagaaggacctgatcatcaagctgcccaagtacagcctgttcgagctggagaacggccggaagcggatgctggccagcgccggcgagctgcagaagggcaacgagctggccctgcccagcaagtacgtgaacttcctgtacctggccagccactacgagaagctgaagggcagccccgaggacaacgagcagaagcagctgttcgtggagcagcacaagcactacctggacgagatcatcgagcagatcagcgagttcagcaagcgggtgatcctggccgacgccaacctggacaaggtgctgagcgcctacaacaagcaccgggacaagcccatccgggagcaggccgagaacatcatccacctgttcaccctgaccaacctgggcgcccccgccgccttcaagtacttcgacaccaccatcgaccggaagcggtacaccagcaccaaggaggtgctggacgccaccctgatccaccagagcatcaccggcctgtacgagacacggatcgacctgagccagctgggcggcgacgagggcgccgacaagcggaccgccgacggcagcgagttcgagagccccaagaagaagcggaaggtgtga

SEQ ID NO: 730 - protein, 1588 aa, synthetic construct
MSEVEFSHEYWMRHALTLAKRARDEREVPVGAVLVLNNRVIGEGWNRAIGLHDPTAHAEIMALRQGGLVMQNYRLIDATLYVTFEPCVMCAGAMIHSRIGRVVFGVRNAKTGAAGSLMDVLHHPGMNHRVEITEGILADECAALLCRFFRMPRRVFNAQKKAQSSTDSGGSSGGSSGSETPGTSESATPESSGGSSGGSDKKYSIGLAIGTNSVGWAVITDEYKVPSKKFKVLGNTDRHSIKKNLIGALLFDSGETAEATRLKRTARRRYTRRKNRICYLQEIFSNEMAKVDDSFFHRLEESFLVEEDKKHERHPIFGNIVDEVAYHEKYPTIYHLRKKLVDSTDKADLRLIYLALAHMIKFRGHFLIEGDLNPDNSDVDKLFIQLVQTYNQLFEENPINASGVDAKAILSARLSKSRRLENLIAQLPGEKKNGLFGNLIALSLGLTPNFKSNFDLAEDAKLQLSKDTYDDDLDNLLAQIGDQYADLFLAAKNLSDAILLSDILRVNTEITKAPLSASMIKRYDEHHQDLTLLKALVRQQLPEKYKEIFFDQSKNGYAGYIDGGASQEEFYKFIKPILEKMDGTEELLVKLNREDLLRKQRTFDNGSIPHQIHLGELHAILRRQEDFYPFLKDNREKIEKILTFRIPYYVGPLARGNSRFAWMTRKSEETITPWNFEEVVDKGASAQSFIERMTNFDKNLPNEKVLPKHSLLYEYFTVYNELTKVKYVTEGMRKPAFLSGEQKKAIVDLLFKTNRKVTVKQLKEDYFKKIECFDSVEISGVEDRFNASLGTYHDLLKIIKDKDFLDNEENEDILEDIVLTLTLFEDREMIEERLKTYAHLFDDKVMKQLKRRRYTGWGRLSRKLINGIRDKQSGKTILDFLKSDGFANRNFMQLIHDDSLTFKEDIQKAQVSGQGDSLHEHIANLAGSPAIKKGILQTVKVVDELVKVMGRHKPENIVIEMARENQTTQKGQKNSRERMKRIEEGIKELGSQILKEHPVENTQLQNEALYLYYLQNGRDMYVDQELDINRLSDYDVDHIVPQSFLKDDSIDNKVLTRSDKNRGKSDNVPSEEVVKKMKNYWRQLLNAKLITQRKFDNLTKAERGGLSELDKAGFIKRQLVETRQITKHVAQILDSRMNTKYDENDKLIREVKVITLKSKLVSDFRKDFQFYKVREINNYHHAHDAYLNAVVGTALIKKYPALESEFVYGDYKVYDVRKMIAKSEQEIGKATAKYFFYSNIMNFFKTEITLANGEIRKAPLIETNGETGEIVWDKGRDFATVRKVLSMPQVNIVKKTEVQTGGFSKESILPKRNSDKLIARKKDWDPKKYGGFDSPTVAYSVLVVAKVEKGKSKKLKSVKELLGITIMERSSFEKNPIDFLEAKGYKEVKKDLIIKLPKYSLFELENGRKRMLASAGELQKGNELALPSKYVNFLYLASHYEKLKGSPEDNEQKQLFVEQHKHYLDEIIEQISEFSKRVILADANLDKVLSAYNKHRDKPIREQAENIIHLFTLTNLGAPAAFKYFDTTIDRKRYTSTKEVLDATLIHQSITGLYETRIDLSQLGGDEGADKRTADGSEFESPKKKRKV

SEQ ID NO: 731 - DNA, 20 bp, synthetic construct
  source 1..20: mol_type = other DNA
cccgcaccttggcgcagcgg

SEQ ID NO: 732 - DNA, 20 bp, synthetic construct
  source 1..20: mol_type = other DNA
aagatacctgaataactctc

SEQ ID NO: 733 - DNA, 20 bp, synthetic construct
  source 1..20: mol_type = other DNA
aagatacctgaataaccctc

SEQ ID NO: 734 - protein, 1566 aa, synthetic construct
MSEVEFSHEYWMRHALTLAKRARDEREVPVGAVLVLNNRVIGEGWNRAIGLHDPTAHAEIMALRQGGLVMQNYRLIDATLYVTFEPCVMCAGAMIHSRIGRVVFGVRNAKTGAAGSLMDVLHHPGMNHRVEITEGILADECAALLCRFFRMPRRVFNAQKKAQSSTDSGGSSGGSSGSETPGTSESATPESSGGSSGGSDKKYSIGLAIGTNSVGWAVITDEYKVPSKKFKVLGNTDRHSIKKNLIGALLFDSGETAEATRLKRTARRRYTRRKNRICYLQEIFSNEMAKVDDSFFHRLEESFLVEEDKKHERHPIFGNIVDEVAYHEKYPTIYHLRKKLVDSTDKADLRLIYLALAHMIKFRGHFLIEGDLNPDNSDVDKLFIQLVQTYNQLFEENPINASGVDAKAILSARLSKSRRLENLIAQLPGEKKNGLFGNLIALSLGLTPNFKSNFDLAEDAKLQLSKDTYDDDLDNLLAQIGDQYADLFLAAKNLSDAILLSDILRVNTEITKAPLSASMIKRYDEHHQDLTLLKALVRQQLPEKYKEIFFDQSKNGYAGYIDGGASQEEFYKFIKPILEKMDGTEELLVKLNREDLLRKQRTFDNGSIPHQIHLGELHAILRRQEDFYPFLKDNREKIEKILTFRIPYYVGPLARGNSRFAWMTRKSEETITPWNFEEVVDKGASAQSFIERMTNFDKNLPNEKVLPKHSLLYEYFTVYNELTKVKYVTEGMRKPAFLSGEQKKAIVDLLFKTNRKVTVKQLKEDYFKKIECFDSVEISGVEDRFNASLGTYHDLLKIIKDKDFLDNEENEDILEDIVLTLTLFEDREMIEERLKTYAHLFDDKVMKQLKRRRYTGWGRLSRKLINGIRDKQSGKTILDFLKSDGFANRNFMQLIHDDSLTFKEDIQKAQVSGQGDSLHEHIANLAGSPAIKKGILQTVKVVDELVKVMGRHKPENIVIEMARENQTTQKGQKNSRERMKRIEEGIKELGSQILKEHPVENTQLQNEKLYLYYLQNGRDMYVDQELDINRLSDYDVDHIVPQSFLKDDSIDNKVLTRSDKNRGKSDNVPSEEVVKKMKNYWRQLLNAKLITQRKFDNLTKAERGGLSELDKAGFIKRQLVETRQITKHVAQILDSRMNTKYDENDKLIREVKVITLKSKLVSDFRKDFQFYKVREINNYHHAHDAYLNAVVGTALIKKYPKLESEFVYGDYKVYDVRKMIAKSEQEIGKATAKYFFYSNIMNFFKTEITLANGEIRKRPLIETNGETGEIVWDKGRDFATVRKVLSMPQVNIVKKTEVQTGGFSKESILPKRNSDKLIARKKDWDPKKYGGFDSPTVAYSVLVVAKVEKGKSKKLKSVKELLGITIMERSSFEKNPIDFLEAKGYKEVKKDLIIKLPKYSLFELENGRKRMLASAGELQKGNELALPSKYVNFLYLASHYEKLKGSPEDNEQKQLFVEQHKHYLDEIIEQISEFSKRVILADANLDKVLSAYNKHRDKPIREQAENIIHLFTLTNLGAPAAFKYFDTTIDRKRYTSTKEVLDATLIHQSITGLYETRIDLSQLGGD

SEQ ID NO: 735 - protein, 84 aa, unidentified
  source 1..84: note = Bacillus phage PBS2
MTNLSDIIEKETGKQLVIQESILMLPEEVEEVIGNKPESDILVHTAYDESTDENVMLLTSDAPEYKPWALVIQDSNGENKIKML

SEQ ID NO: 736 - protein, 16 aa, synthetic construct
SGSETPGTSESATPES

SEQ ID NO: 737 - protein, 4 aa, synthetic construct
SGGS

SEQ ID NO: 738 - protein, 24 aa, synthetic construct
SGGSSGSETPGTSESATPESSGGS

SEQ ID NO: 739 - protein, 32 aa, synthetic construct; identical to SEQ ID NO: 693

SEQ ID NO: 740 - protein, 104 aa, synthetic construct
GGSGGSPGSPAGSPTSTEEGTSESATPESGPGTSTEPSEGSAPGSPAGSPTSTEEGTSTEPSEGSAPGTSTEPSEGSAPGTSESATPESGPGSEPATSGGSGGS

SEQ ID NO: 741 - protein, 24 aa, synthetic construct
SGGSSGGSSGSETPGTSESATPES

SEQ ID NO: 742 - protein, 40 aa, synthetic construct
SGGSSGGSSGSETPGTSESATPESSGGSSGGSSGGSSGGS

SEQ ID NO: 743 - protein, 64 aa, synthetic construct
SGGSSGGSSGSETPGTSESATPESSGGSSGGSSGGSSGGSSGSETPGTSESATPESSGGSSGGS

SEQ ID NO: 744 - protein, 92 aa, synthetic construct
PGSPAGSPTSTEEGTSESATPESGPGTSTEPSEGSAPGSPAGSPTSTEEGTSTEPSEGSAPGTSTEPSEGSAPGTSESATPESGPGSEPATS

SEQ ID NO: 745 - protein, 7 aa, synthetic construct
PKKKRKV

SEQ ID NO: 746 - protein, 30 aa, synthetic construct
MDSLLMNRRKFLYQFKNVRWAKGRRETYLC

SEQ ID NO: 747 - protein, 167 aa, Escherichia coli
MSEVEFSHEYWMRHALTLAKRAWDEREVPVGAVLVHNNRVIGEGWNRPIGRHDPTAHAEIMALRQGGLVMQNYRLIDATLYVTLEPCVMCAGAMIHSRIGRVVFGARDAKTGAAGSLMDVLHHPGMNHRVEITEGILADECAALLSDFFRMRRQEIKAQKKAQSSTD

SEQ ID NO: 748 - protein, 160 aa, Staphylococcus aureus
MGSHMTNDIYFMTLAIEEAKKAAQLGEVPIGAIITKDDEVIARAHNLRETLQQPTAHAEHIAIERAAKVLGSWRLEGCTLYVTLEPCVMCAGTIVMSRIPRVVYGADDPKGGCSGSLMNLLQQSNFNHRAIVDKGVLKEACSTLLTTFFKNLRANKKSTN

SEQ ID NO: 749 - protein, 161 aa, Bacillus subtilis
MTQDELYMKEAIKEAKKAEEKGEVPIGAVLVINGEIIARAHNLRETEQRSIAHAEMLVIDEACKALGTWRLEGATLYVTLEPCPMCAGAVVLSRVEKVVFGAFDPKGGCSGTLMNLLQEERFNHQAEVVSGVLEEECGGMLSAFFRELRKKKKAARKNLSE

SEQ ID NO: 750 - protein, 183 aa, Salmonella typhimurium
MPPAFITGVTSLSDVELDHEYWMRHALTLAKRAWDEREVPVGAVLVHNHRVIGEGWNRPIGRHDPTAHAEIMALRQGGLVLQNYRLLDTTLYVTLEPCVMCAGAMVHSRIGRVVFGARDAKTGAAGSLIDVLHHPGMNHRVEIIEGVLRDECATLLSDFFRMRRQEIKALKKADRAEGAGPAV

SEQ ID NO: 751 - protein, 164 aa, Shewanella putrefaciens
MDEYWMQVAMQMAEKAEAAGEVPVGAVLVKDGQQIATGYNLSISQHDPTAHAEILCLRSAGKKLENYRLLDATLYITLEPCAMCAGAMVHSRIARVVYGARDEKTGAAGTVVNLLQHPAFNHQVEVTSGVLAEACSAQLSRFFKRRRDEKKALKLAQRAQQGIE

SEQ ID NO: 752 - protein, 173 aa, Haemophilus influenzae
MDAAKVRSEFDEKMMRYALELADKAEALGEIPVGAVLVDDARNIIGEGWNLSIVQSDPTAHAEIIALRNGAKNIQNYRLLNSTLYVTLEPCTMCAGAILHSRIKRLVFGASDYKTGAIGSRFHFFDDYKMNHTLEITSGVLAEECSQKLSTFFQKRREEKKIEKALLKSLSDK

SEQ ID NO: 753 - protein, 161 aa, Caulobacter crescentus
MRTDESEDQDHRMMRLALDAARAAAEAGETPVGAVILDPSTGEVIATAGNGPIAAHDPTAHAEIAAMRAAAAKLGNYRLTDLTLVVTLEPCAMCAGAISHARIGRVVFGADDPKGGAVVHGPKFFAQPTCHWRPEVTGGVLADESADLLRGFFRARRKAKI

SEQ ID NO: 754 - protein, 179 aa, Geobacter sulfurreducens
MSSLKKTPIRDDAYWMGKAIREAAKAAARDEVPIGAVIVRDGAVIGRGHNLREGSNDPSAHAEMIAIRQAARRSANWRLTGATLYVTLEPCLMCMGAIILARLERVVFGCYDPKGGAAGSLYDLSADPRLNHQVRLSPGVCQEECGTMLSDFFRDLRRRKKAKATPALFIDERKVPPEP

SEQ ID NO: 755 - DNA, 25378 bp, Homo sapiens
  source 1..25378: mol_type = genomic DNA
gtccgatggggctctggtggcgtgatctgcgcgccccaggcgtcaagcacccacaccctagaaggtttccgcagcgacgtcgaggcgctcatggttgcaggcgggcgccgccgttcagttcagggtctgagcctggaggagtgagccaggcagtgagactggctcgggcgggccgggacgcgtcgttgcagcagcggctcccagctcccagccaggattccgcgcgccccttcacgcgccctgctcctgaacttcagctcctgcacagtcctccccaccgcaaggctcaaggcgccgccggcgtggaccgcgcacggcctctaggtctcctcgccaggacagcaacctctcccctggccctcatgggcaccgtcagctccaggcggtcctggtggccgctgccactgctgctgctgctgctgctgctcctgggtcccgcgggcgcccgtgcgcaggaggacgaggacggcgactacgaggagctggtgctagccttgcgttccgaggaggacggcctggccgaagcacccgagcacggaaccacagccaccttccaccgctgcgccaaggtgcgggtgtagggatgggaggccggggcgaacccgcagccgggacggtgcggtgctgtttcctctcgggcctcagtttccccccatgtaagagaggaagtggagtgcaggtcgccgagggctcttcgcttggcacgatcttggggactgcaggcaaggcggcgggggaggacgggtagtggggagcacggtggagagcggggacggccggctctttggggacttgctggggcgtgcggctgcgctattcagtgggaaggttcgcggggttgggagacccggaggccgaggaagggcgagcagagcactgccaggatatcctgcccagatttcccagtttctgcctcgccgcggcacaggtgggtgaaggagtgaatgcctggaacgtactgggaactgcaccaggcacagagaaagcgggcttgccattatagtgggttccgatttggtttggaaaacatgggcagcggagggtggagggcctggagagaaggccctacccgagacaggggcggggtgggaaggacggcagatgctgggagcacgaggcaatttctttatgacacagaactcatgctctagtattccatctgtttcagccgaagaaaagaaccagctgaaggggcaggggagaaggggcggaggtattctcgaggcccattggcgtcctttaggactcaggcagggaagggcccttggtgctctggagccggaggtggtgcgcctggtactgggaccccggagctgagcccggcgcctcagcccacctggctgtctgccgaccgtgtgcggggcgagtttgctcaacaactctgccagcttctggccctcaggctgtgggaagcttcttcccggggcgagaccactagctttttctaagtattaccagcccaggacttggctgaggttctgtgtcccccagcttggagtcagatgtggggttgaatcttggcttcctctcactagctgtggtgcttgacaagtcacttatccttgagcctccattgcctaatctttaaaagggaggtgacaatcgtccctacggctcagtggcagcagatggggagatgaagggaaagttctgttgaccatgagtgaacttacaatgcaagccccggggggatcacttgcagttttgtccctgtctgcagtgtgacctgttggtgacattgtctttgctccaaaccacagctcctggggcagaggggaaaattctgccactcacagctgcctgcccacgcttctgtctgagtgtgctgggtggcaggatggcaagtccttactcagctcagtatagccctcttccttgttccctgagcctttgactttctcgagggatgttgtggggttgtggccaggataagaaagggcatttcaagttaccactgctccaaaacaactgttctggaaatagtgagtaccccatcctgagaggtgagtaagcagaggctgtatgaccacctgaaccaagcccttgaggatgtttcttctctggtggaagtttggaacaggagcctcctcaagttcatttattcattcattcaatggttattttgtgggaatcgaatttagaatgaaaatattttttggcaagcagaaaataatttttagaccaatccttttcttttagtcatgagaaactgaggcccagagagaggaggtcaccccaggtgcattagaactgggtttccagaactgacactccactgcacagagtactctcccaattcattcaatttttatttagcggaaggcattttcagatgggtctttgaagcattagtaggagttcagcgatgatggtgtcatgagaattttattctaggattaggaggtaccatgaacaaagatacagagctgggaaaaccagaggtggaagataaggagcacatgtccacagttctttttcttttttttttgagatggagtttcgctcttgttgcccaggctggagtgcaatggtgcagtctcagctcactgcaacatctgtctcccgggttcaagtggttctcctgcctcagcctcccaagaagctgggattacaggtacctgccaccacgcccggctaatttttgtatttttagtagagaaggggtttcaccacgttggccaggctagtcgcaaactcctgacctcctcagtggatccgaggaggtgatcctcccgcctcagcctcccaaagtgctcgaattacaggtgtgagccaccacgcctggcctccacagttctttatccaccgtctgaaatgtaaaatgttacgaaaaccaaaagttttttttgtgatttatttgatggtagcacctgacgtgaactgacatgagattatttttaatttagttgtgtgaatatgcatattcatatattttgctgcatagattacagtatgcagctccagattcttccaagcagactctgattgcccattactgcctttctaaaatccaaacaagttctgaggttcaaaaccgttttggccctaaggctttgggtaaagggggtggactctgttctactctgactggagtccaagatgcatatatacagagatatgggtgatggggctgcaaggtaggttgaggtaggggccaaggaggagcatggagtttggacttgattcatgaggctgtggggagccagtgaaggttcttaagcaggtatgtctgcctgagagcagttggagcagacaagagctaaaaaccaaacaaatcaccatagatagtggctgctataatttgtttgtcccctccaaatctcatgtggaaatttggtcctcagtgttggaagtggggcctaatgggaggtgtttgggtcatgggggaggaacccctgtgaaaggcttggtgccgtccttgtgataatgagtaagttctcccgctatgatttcccttgaaggctgattattaaaaagagcttggcacctccctctcttctctcttgcttcttctcttgccatgtgattgatctctgcacatgtaggctccccttcaccttctgccatcagtgaaagcagcttaaggccctcaccagaagcagatgctggtgccatgcttcctggagagcttgcagaatcatgagctgaataaatcccttttccttgtaaattactcaccttcaggtattcctttatatagcaacacaaaaggactaagacagtggccttgacttttctctctctttaagaagtgttgcctttgctcacttagtcatcccttctgcctgcatttgtagagcatctggatgggagatttatataaccgtcactcttgactttcccagcaggcctatgtcataggtactgtggtctctacaatacagcagaggtatctgaggctccgagaggttgagtgacttgctcatggctgcacaaccagtaaatattggagctggaattcaggtccacggtttcctggctccaaagcccatgattttttccctcaatttattctgactggggcatgggggagggggtggcctttgggcagggccaccaggagcgaccaggcccgtagagagctgggtgcaggtacagaggaaaacctgttgtcgagtgtggcccgtagttcccatttttgcctgaatggcacatttgaaagtgttatataaccatgtgaataataatagttggcctatatgagttctttaatttgctttttggtccgcatttggtaacttctttatcatctactatactctgttgtgtctcttttgttgtaatttgtaagtaggggtgagataaagtacacctagggtttgctgggtttcttccatgtcatcatgttcctccttgcatggggccaggatccgtggaggttgcctggcacctacgtggtggtgctgaaggaggagacccacctctcgcagtcagagcgcactgcccgccgcctgcaggcccaggctgcccgccggggatacctcaccaagatcctgcatgtcttccatggccttcttcctggcttcctggtgaagatgagtggcgacctgctggagctggtgagccaccctttttgggaatggcacttcctgatagggctgggccactgcatatacactggggactgtgcttagtaggcccattgctgaaaatcagaaggggacagcaagtatgtattgagcacttatcgggtaccaagcacagtaactactggctttctgtatagaattccctttaagcctggccatgccccagtggtacgtctatcttcatttgaaagacgaggagactgaagttcagaggggaccacacagacagctaggggtagagcctggatcaaacccattggtctgcctgccagccattcttgtgccaatgcatctgctgcctacggaaacctgtagggacaaggccctgggatgttcagtggagcctgagtcattttataaaaaagcatgactctagggtccaaaattcctttgaagctgttgctatccagagtgaagtcccttctttaggacagggtggccctcctccctcctggatgtcacatcttcggtggaggggcagaaaggggactgggtattctcctcaccctggccctagtgcttcaaatcttaaaaaaacgtttttatttgtgcttctgcaccaccttctagcccacctcgtttcctggcctctaacttgatgagagcgtgtgtcattttcacactgattctccacatggcaggcggtgcttcttagcctcctgcagacagtgaggccccacggtcttgtccaaggtcacacagcgtgtaatgggcagggtcagagtctggagtctggacctgggtctcctagctgcactgcactgctgccccatgggttaatcagctcagcataccgtggctgaacagctacctcataccaaggcctgtggcgccatgacagggattgacagggtccctgccttggaaacccgtagtctaagtagaggagactgacaagtcaatgccttccatcagtctgctcaacacacgtttaccaagtgcctactgtgtgctgcagaggcgaagatgacacagctcaggcctttcccttgagcttacagttcaggaggagagactgaccagtgactgccagtacagttgactatgggacaatgtgctcagccttggggagagacgaagaaggtacccgtatagcaccagatgacaggcacgagccccacaggccagggcagctgctcagaggagagtaggccaagcagaaggcaaacagaaggctgcaggcatttgccatcgagagctggacttcaaactgggcatcataccagcctgggttcgagtcctgcccagccccttattggctgtctaaccctgagcaaatcccttcacctctctgagcctcattcctctatctgtaaaccagttataataattggaacattcatttaaggactaaatgaggtcgtgaagcattcagcagatgctaggtacggaaactcgctgaagtgggggcaggttaagaagcctctggggatacgaaggcatccagggactagttgtggcaggaggctgttaccacttaggtctgaagggtaaggagagggaatagctttccctctgcccagttggagccggtggcatggaggagaggctgcctgtggggaatcacccgagggttcaccgctgccatgcgcagggagtcaggaggtagggagggagtggggcagatgcacaccatttttttttttttttgagactctgttgcccagactggagtgcagtggtgccatatctgcacctctgcctcccgggttcaagctcactgcaacctctgcctcccgggttcaagcgattctcctgcctcagcctcccgagtagctgggactacaggtgtgtgccaccatgcctggctaatttttgtatttttaatagagatggggtttcaccatgttggccaggctggtctcgaactctcgacctcaggtgatcccccacctcggcctcccaaagtgctgggattacaggcgtgagtcaccgctcccagctgctgatgcactcttgtccttctaactcctgctagtgcctcccattggctgagcccaactggaagctttgcaagggagctggtgctgcagtttgcactgagcaggctggagaaggctggagaatagactaggggacaaaccgaattgccagtgctgttatgtcatgatttaggcatggagtccagggcctgagcttcactccatgtccatcctgcccagagccttggcacagcctggctcccagacaagatgtcaagttcagaatccttcctaaaaggaatcctctatgccagaccgtgttgcagggatatgggagtgctgggctcccagcctgatcaaggagcgagaaaactcaggctcctagtctgtcctccggggcactagcagggacaaggtgggaggctgctgggctgggatgtggggacaggtttgatcaggtaaggccaggctgtggctgtgtttgctgctgtccaaatggcttaagcagagtcccccggcctctctggcttctgcaggccttgaagttgccccatgtcgactacatcgaggaggactcctctgtctttgcccagagcatcccgtggaacctggagcggattacccctccacggtaccgggcggatgaataccagccccccggtaagacccccatctgtgccctgccccaccccatctgagctgaatccatttgctctgccctggcctggcctccctgctggtggtttccacttctcggggggctttgggactcagcacctccactgacccctttttttctgtcccatccccatcccctgcagcccccactgcctgccttcctgttgccccacaaatgcaaaagtcttgccttaaatgatcctcttttccttcttttctcttgttttccttttctcaccatttggaatggcccagcaggctgcacttaccttggaaggagggttcatctgatggtgactctacctagggcccccaggcctctataactcccagtgccctgcagactggaccagatcctttaatgggatagacacaaccctgtctgggatgcctctgcctaccttcctgttttgctgctccacctgcctccagctccgtttggcttcctggggctccctgcctgggccactttgtgtcttccctctaggcctttctttccactgttccctctgcctggtgtggcctggctatggaagggagggaggaggagcggccatggaaaacggtctgcattctagcagggacttgcaggtggcaattcagtcggggaagactctagatgcacctggcctgaggagagaatgaagggttctagttggactgtgttaagtttgaggtgcccatggtgtgaggtctggagctcagcgcagagatgatgcaatgtggtgggtccatgcaacatggtgccaggacgcagagcttggggtgaactcagctttcaccccttaccggttctcgtgggatcttgggaagccactttcttctatgagctttgtcgttcttgtctgtaaaatgggcacataaccctgtccctgtccttctcacaggttgctgtgagactccaatgagttgaaggatgtgcagatgcttttggaagtgaaaagttggggggctactgtgtgactttgcatacacccaaactgtgtgaccttgcatatgtctgagttgctgccattgcaacagatcagagctggtgggctgggtgtggagaaagggtttgtgtgggggacatcctctggcaagggtggcagcagcagaagtgaggggcctggtcggtcatgtgtgctgacccggcctgggcagcctgtggccagggagaggacagctcctctgtaggaagagcctgttcctttccaaccaggtgagacctcttcagtggagccctggagccccctgtactccacatcagtgcctcagggacctcccggagcaggctaatatcagagaccaagagggacactggcagaggatcacagagaccccagtccaggcagggactgagaagatcttgccccctaagttagtttcctagcactgctgtgacaaattaccaccccctcggttggaacaagttgattctctgcagtcctggaggccagaagcctgaatcagtgtcggcaggaccactttctcccggggggctccagggagaagcttctcttgcctcttccgtgtcccaacagcggcagcacaccaatcccagcctctgtcttcacacagccttctctgtgtctctctcctcttcattgtctcataaggacacttgtcattggatttagggcccactggatcctccaggatgatctcatgtggggaaccttaaccacatctgcaaggaccctttttccaaataaggtcacagccacaggttgtgggggttaggatgtgagtgtatctctttggcagccactgttccctcctctcccttgggccagaagcagacgtggggccctttcttccccataggatgcccatggattgccccccttcccgcttcccccgagtgtctgtgggaggtggcaggaatggcaggcaggggtgtggaaccccttctggagtcatatcaagggcttggctggaggaagtcctcctggagctgttgggctggcatggggcaggctggctgggcccagcagcagcttcttcattcatggggaggccacaagcatgggccctagagctggctgccgccctcaaacccagaccctgcactcttaactgtgtgaccttgcatacgtcactcaccctctctgatcttcaggttcctctgcaaaagggaggtaatgataaccctcactctggggggctgtttggagggttaaatcagttattgctgtagcatgcatttctctgtcaggtattgagtgaggtgctgtgattttagccctgcatttttcttttcttaccattcaataataacgttttgagcacccactgtgcgccaggcaccatattaggtgctggggatacaaatgtgaatgaaatgaatgtggtctcttcccccaacagtgtatccagaagattaatccattccttaaacaaatgctacttgacacagattagttctggataggctgagagctctgaaggagtgcaggcagctgcgagcctgtgtatccagcagaaggatcaggaaaggattcctggaggaagcgctgttctagccaagacctacgggggcattattaaccaggcaaaggggacggtgtccaagcagtggaatgaacgtggattgaagctgtgaggcaggagggagtgtggcctgtgcagaagggaccgaggctggtgagaccaggagggcctgggtggcctccaggtcagatgtgaaaggaagaacttggccacagtctgagcttctcaggcgtatggcagggctgcctggtgagagggaatgagctccctgctctggaggtatgcaagcaggactgggctctcacctgccagaggccacagagctttccagaggctggaagaggccactccaaggcctctttgcccctgagagtggtggctcttcttgaggccaccttgccacgctgtcacagggaactagcagcccctgcctcacccgggggtttggaagatagagggaggcctaggaagggccctgtgtctcatccgagctgggcccctttccagcctctcactggaaggaagcccaaggatgttcctgtgggggcttttaccaggcccacctgccctctgctggccatgcttgcagcctcctgaccctgtcccagcaggacagtgggctggtgtgagcgggcaggaaccgcctgcacttagaaggtgtggggctgcctccccgagcttccatctgccgctggggccacaccccaggcccagggatgggaccccacagtggtcacatcatcttgcagcagaacccaggtacagctcctggagcagatggtggtcccaagcacgggtgggaccagaaaggactctcacctgggctaactcagctgcagcctcagttccctcctcacacacgacgaggaacatggactggaagcctgcccagcaggccttctgctcgatgtgcgttgtgtggcttacgtccagggagggaagcagcctctgtgctgtcttctagataagcctgtattccccgggctgtctgccaatgtatccagttgtcccgtcagcctggaagctctgagggaaaaccttgggctgcttcctgagcacctgtatcccctgcagccagcccggggcctctgctaggagcagactgagcatggcttatgggcctggcaccatctggcctctgcccaccttgctggccttgtcttgtgtctgccccttcgacattccatagcccagctcaatatctagtggttcctctagggtggcgagcactgtttggtctccagatgtcttcaggtcggagctcacagcgctctcagccaccccttcccagtgtagcaccgggcacatggtagatgcctattgatgagtgaaagctcctaacacactcagagagcaaggactccgcctcatcccacagcctgggaggagaggcagactgccaaggacctgctcagcatgctacagaagaaaccaaagtgcccacgggactgatcagtggagcttcctgccgagactggaggccttagggcagggtagacagtgtgtgtgcaggctggggactcacagttcggactgtgcccagacctactagcatagtgggtgggtgggaggatgcgggactgggggccgaccttgcctgaaattcatgtgggatctcagagcagccactgaattgctctgtagggggctaaatagtggcccccacagatacacacacccagacagagcctgtgagccagaccttatttggagaaaaggtctttgtagatgtaattaagcatctcaagatggcatcatctggattatgcggtgggctgtaagtcctgtgatgtgtctttatgagagaaaggcagagggagatttgacacacacaggaggggccacgtggagacagaggtggagattggagaaatgtggccacaagccagggaacaccagcagccaccagaagccggaagacgtgaggcagggttcttcccagagccttcgctgctgagtctgggaatttgtgaccgaagccataagaagtgggtacacgccctgagcctcccacacttgctcacctgtcctgagatgagaatctctactctgcagcatatttggaggatcactgcgggggccacagaggtgctgttcagatggcacttcagaagactcaggagaccctggggcaggagcagtttgactgacagcccagagggctgccctctgattccacctgaggccctgcttttcctggctgcaggggttccagggccaggccatttccgctggcgcaggactctgctagcagcaacctgcctgaagtcttcctttggcctggctgagagtttctgagacctgcgctggagcggaggtgcttccttccttgcttcctttcttcctctctcccttctccatccagcaggctggacctgcctggcatctgtgagctctccctactttctcctataccctaacctttgtcctgcatgggcgactcccccagtgagtctcttgcagcttttaccccagtgcctgcttcttggagaatccaaactgatccagttagggatgataaagtgtagggtaggcgctcggtgactgttttctctgaggttgtgactcgtgtgaggcagaagcagtccccgtgagccctcctggtatcttgtggagtggagaacgcttggacctggagccaggaggcccagacatacatcctgtccgagctgcagcttcctgtctctaaaatgagccggccagcgcaggtggccagacatcactgttattctcctttgagtctttaaatcttgttgtctttcttgcagactcggtgagctgtgaaaggctataataggggctttattttacactttgatactattttttgaacattcatattattgttagatattgatattcatatgaaggagcaggatgacttgggtccttcttggcagtagcattgccagctgatggccttggacagttacctgccctctctaggcctccctttccttgtctatgaaatacattatagaataggatgtagtgtgtgaggattttttggaggttaaacgagtgaatatatttaaggcgctttcaccagtgcctgggatgtgctctgtagtttctgtgtgttaactataaggttgactttatgctcattccctcctctcccacaaatgtcgccttggaaagacggaggcagcctggtggaggtgtatctcctagacaccagcatacagagtgaccaccgggaaatcgagggcagggtcatggtcaccgacttcgagaatgtgcccgaggaggacgggacccgcttccacagacaggtaagcacggccgtctgatgggagggctgcctctgcccatatccccatcctggaggtgggtggggactgccaccccagagcgttgcagctgtactcctgggttgcaccccccccagctgtcactgtcccctccctgccatcagttgtgggaagggcgttcatccatccagccacctgctgatttgttatagggtggagggggggtctttctcatgtggtccttgtgttcgtcgagcaggccagcaagtgtgacagtcatggcacccacctggcaggggtggtcagcggccgggatgccggcgtggccaagggtgccagcatgcgcagcctgcgcgtgctcaactgccaagggaagggcacggttagcggcaccctcataggtaagtgatggccccagacgctggtctctctccatctggacctggcctgggaggtggcttgggctgggcccagggagagctaatgtctcctaaccaagaatgctgtggcagcctctgccgcagagccagagaaccagagtgccaaggctggcagggttcccagtggccacgagtgcagatgaagaaacccaggccccaagagggtcatgcaggtagcccagggagttcagccttgaccctgggtcaatgacctttccacagttccacactgctccccttttaaaatccggtgatgtctttatgtcttttgttatgttatcttcaatgtggagggactcgaggtgatctaagcaaactttttctatcttctgcttgcatacctctgagaccaggggactcactcacttgcatgactgggccctgcaggtcacactggccaggcagatgtggtggaggaactggcagaggactttttctagactgtgactacatttagtccacccagcggcccccctatgaagtccagttgagaactaggactctgggggccggtggacagagaagagggagggttctctcccttactgacttccttctgtggccagacattgagcaaggcctctgtacagcatgtcctggggctggccttgccgtagctgctaaatagttgacgaaaccagtccagagaggggaggtgactgccagggtcgcacagctcaagctggggaactcgctgggaaaactgtcagctctgggcagcagcttgacttccactgtaagccccagcccccagggtcaaacactggctctggtgctggcagaggcagcccactagcctgtttcaaaggctgagaaggcccaggagtctgccctgtgctccaccagttctgccctgagactttcctacagagtacaggttttgatgttcagttttaaaggcaagaatcaataaccttctgccccatcaggtgaccccttgtgcctgtcccacccctttattgactgacctcggctcagtcaggtcagttcctgaaggtcagtgtgtggaggggaggctgttctttcccagaaaggccttccccaggcctggtgctctggcctctggaggacttcctggagaagtcccttctttggggtcccagtcagtgtatgggaagcccttattgcatgacctggcacggggcaggggctcaacagtcactattgccttccttgccactgccatttcctcctctgtaagcaggtgattgtgtgtccagtctgagcacagagataagcacacagcaggtgcttaataactagcagctgtaggctgggcgcggtggctcatgcctgtaatcccagcactttgggaggccgaggtgggcagatcacctgaggtcaggagttcgagaccagcctgttcaacatggtgaaaccccgtctctactaaaaatacaaaaattagccaggcatggtggtgggtgtctgtatcccagctacttgggaggctaaggcaggagaatcgcttgaacccaggaggtggaggttgcagtgagctgagatcgtgccactgcaatccagcctgagtgatagagcgagattccatctcaaaaataaataagtaaataactagcagctgtaaatgtggctgttgttcttcacctccacactcagtgccactccactccctccctccgtggtgtgaggggcctcactagctgtctcctaggaggagcatggctgtgagattccagctccatccttggccacggctcctggagacatcttagaggccaggatccagaaggctcccacacctcatttgacaggggagaagctgtcagttccaggtccccttgcacatcagggccagagctgcgttaggcctccagtctccaggccactgggccagagctcacaggctggcagagggttagaactgttactggtggctgggtgcagtggctcacgcctgtaatcttagcactttgggagggcaaggcgggaggatcatgaggtcaggacatcgagaccatccttgctaacacggtgaagccccgtctctactaaaactacaaaaaattagccgggcgtggtggcaggcgcctgtagtcccagctactcaggaggctgaggcaggagaatggcgtgaacccgggaggcggagcttgcagtgagccgagattgcgccactgcactccagcctgggcaatagagcgagactccgtctggaaagaaaaaaaaaaaaaagagctgttactgttgacagtagcatgaggtagaccatggcctgcaccaaaatgggggagtggagtgccactgaggccagaaggaaccacaccctcaagggtggggagttatggtatggggggtcctaggcatggagtcttttaattctttagacaatcctgggagcaactgtccctgtttcacagagggcggggccacacagctggtgagtgggcagccaagactctgttcaagtttgtgtgggtccaacacttgcggccacggtggaggggcatctgagccaggcctcagagagtggcgggggaagttgggtggggaagtgtgcccttctcattcctctgaggctcatcctcttggtgcctctctttcatggaaagggataataaggttattgtgaggatcccctgagttcgtatattcagacgcttagacagagccaggcacagagaagggcccggggttggctagtttgattgctggtgtaattgctaatatcttccagtttgtattggtcaaggttctgcagagaagcagaaccagtaggatgtatatattaagagtttcaagctcatgtgaccgtgcgggctggcaagtctgaaatccgcagggcaggccaggcaggctggcaattcctgcagaatttgatgttgcaatactgagtcctaaggcagtcctggggcagaattccttcttccctgggaggcctcagtctgttctcttaaggccttcaactgattaaatgaggcctgcccaagttatagagagtaacctgccttactccgtcttctgatttaaatgttagtcacatctaaaaaatattttcgcagcagcatttccactggcttttgaccaaacatcaggccacaaagttgatccccaaaattaaccatcactctgtgcctgtaagggaggggctgggaaaggggagcaggtctccccaaggggtgaccttggctttgttcctcccaggcctggagtttattcggaaaagccagctggtccagcctgtggggccactggtggtgctgctgcccctggcgggtgggtacagccgcgtcctcaacgccgcctgccagcgcctggcgagggctggggtcgtgctggtcaccgctgccggcaacttccgggacgatgcctgcctctactccccagcctcagctcccgaggtaggtgctggggctgctgccccaaggcgcgggtagggggcggagggcggagggcggagggagggcgggcgggcaggcgggcttcttgtggcacgtgggcttcttgtggcacgttcctggaggccgaacccttctggctttggaaggagtcgtcagagacccccgccatgcgggaggctggggaggaaggggctcgaaacctccatcatcgcagagtctgaatagcagtggccccgccatgcgcccacgtagcggcgcctacgtagccacgcccccacaccccgtcctggccactctccctcctgaaggtcttctggtacccgccccctccccatctccatccccaggccctgcgtcctctgcccaatactctttgggcctccctgttgtccagctctctccgcggctccatgactgacaacttgagcaaggctaatgtgaatgggagcggttgagggctcagacctctcacccgaggaacatccacagagtgtgccgcatgcccggtgcagtgtggctgcggggacacagacacggagcctcggccctgaggagctggggggcagtgaccgtccctcctctgacccaccactcctccagtgtcaggacactgcgggtatctaggggaaggaatcttgttccacttcaagtctggaacttcaagtctgtgtgtgtgcgtgcgcgcgcgcgcgttgggggtgggggttgcagagcagatgcgtacctgacagcggtaacctaggtcccccctggcctatcaaggcttccctggcggccgaatttaaaggcatcaagcaaacaaagcccaacacatctctgccttgtcctctcagtttccccccgtggcacttagaaccacttgatacaccgaatagtttcctatctcccccactaggatgtaaactccacaggggcattgggaatgctgcctggctatggtagggacagaggggagcaccagggcggggcaggggtgccagagttctgcctgggcagtcagattttccttaggaggggacatttgagtgggacccaaacaggtgtatagcagttgtccagcccagctggcaaggcctgagtctgcctctgcaacccctctcttgggctcctttctctgccacccacctcctcacctttccaggtcatcacagttggggccaccaatgcccaagaccagccggtgaccctggggactttggggaccaactttggccgctgtgtggacctctttgccccaggggaggacatcattggtgcctccagcgactgcagcacctgctttgtgtcacagagtgggacatcacaggctgctgcccacgtggctggtaagtcaccaccccactgcctcggccaccgtgatgctaacagcccctttggcagtcagggtctgtgccgggacctccagtgccaggctctgtgcagggggaccagagatgaagtaggcctgatggtgccttcaaggacactcagtctgatgagggaggcgagtgcacagaggaaacacgaggtcagggctgtattagagggagcccagaggaggcacctgcccagcccgagggtcagagaaggcatcttggaggagggacatttgatcgggagcttgatggatgaataggagttcacctggccgataagacagcaactaccaaggcttagaggtgtgagaggaggctgtcttacctcactgagtaaggactgcaggcggcttaccttcgagaagagagcttagtgtctgtgtgcacgtgtgtttgtgtgtatgtgtgtgcgtgtgtgcactggcaggagtcccctgctggggcaggagggccgggccatcaccatctttcaccattcacccctgcaccaggcattgcagccatgatgctgtctgccgagccggagctcaccctggccgagttgaggcagagactgatccacttctctgccaaagatgtcatcaatgaggcctggttccctgaggaccagcgggtactgacccccaacctggtggccgccctgccccccagcacccatggggcaggtaagcaggatggcagggtgggcaagtccaggctggggcttgggaggtctgtgtgaccttgacagtctctcccttctcccttgtctgtgtaaggaggatgacgccaccttaaataggattaaatgagaatggggctctgaaagggctgtgcaatattttcataacgtgtttttatagagacagttgagtatgttctttaagccctcctctctcctaccatgaactaaagatttctgtggaggtcccctcactcccagcaccccctcctcatcccaggccctttttgcaggttggcagctgttttgcaggactgtatggtcagcacactcggggcctacacggatggccacagccgtcgcccgctgcgccccagatgaggagctgctgagctgctccagtttctccaggagtgggaagcggcggggcgagcgcatggaggtgactgtacccctccttcgtgtgtgtgtgtgtgtgtgtgtgtgtgtgtgtgtgtgtgtgtgtgtgtgtgtcagtgctgggccctcagggacccccagcaagcccctccatcctccagactccagctcttctgtaagcttacagggctggccagaccaggagtggggcactcctcacttcacgcggctgggggctgctggagagagccacagcgggaagggtttcctagaggctgcaggacagtgctggatggattttcaatgctcacctgggtgtgagcgtgcggcagggccgcgtgagggtcagcgatctgctactctggactcagccatctctaggcccctctcactcaggtgctccatggttctgggagctgagaaatctcaaaccagcaaaaaagtggaattgatgttgatgctacaggatagtgcacagatgccatctggttgcagcattttggtggaagggcagtgcccagctaggagagtgaggaggggcaggcatttctggcttgaggagatggggtcttaatgctcgtgtgagaggcagagtgggtggagtggagctggctggatccttgctttggcctcctggatttctctctatctccattttgaaaccactctgtgtttggaagaacttttgagtattcagagctgcccactggcagaacagtcttccttgggcaggagtgagctccttgtccccagaaggctgggtctggctggcccctggcagggacactgatgagggtgcttgagttgatcctgtctagtccctttctgtgttttcaaagcccattctaaagcagattcccatttccgtctttgactctaaggcccaagggggcaagctggtctgccgggcccacaacgcttttgggggtgagggtgtctacgccattgccaggtgctgcctgctaccccaggccaactgcagcgtccacacagctccaccagctgaggccagcatggggacccgtgtccactgccaccaacagggccacgtcctcacaggtaggaggctgggcttgccctggggtgaggaggggtctctttctccttatgcacccactgcccgcgaggcttggtcctcacaagtgtgatccatgagactcaagcctgacttgcagttccatactctggttctgccacttccatgccctttgagcctgggcaggtgaccttacttctcctcatctcagcttcctcctccataagagggaaaaaggtattacctgcctcattgtgttgcaaggagatgggcagcatctagggcactggcctggagtatcgcaggtgctttgcctaaggtggtgcagtccaggagaggcagctccagagagaggcccccggctggggctgaaaggagggcagacctcggtttgaatttcaccctgccgctctatagctgtgtgacttgggcaaattacttaacatctctgtatgaggaaatgatgagtgctaagcacttagcttagtgccgggacaatataaattctagctatcgttactattgttttcatcacccgttgctttaaaatccagcctctggtataggcaactattgacgggctaccctgtgtcgaaaacatgcccaggcaggtagcaggaagtcacagatggggacctcttggggcatcaagggatggtgccctgaggctgagctgttctggttgggtggagcatgagaggtctgggaagacagtgggactccagcctggaataagaggctcagagttgattctcgtctgagcacgtccaggggaaccactgagggtttgggaacaggagagtgagggtgagaacctggttctgggcacagcaggctggcatgtaggatggatgttcaggaaagatgagcatagtcaggtggctggtgcccttgtccaggggagaggctccgtcaggttcaggggtcctggcttggagggaagtccgccatgctctaatcacgctcccctttggaagtgctcagccgatgagctcacaggcacatgtcagtttgaagtcatggaatctgactccatgaagcgcacctcaaagagcaccattttgcagctaagggaactgcaggctggacatgctgagtggctgccccgagcccttgcagctaggacatagagaatgctagtaaccacaaccctaccatgttcagagcacatgccaggctccatgctggggcttcgcacgtgtcatcttcacagtgtccctgtgagtaggtgtggtttctctttccatcttacaaatgagtaaacagagcctcagtgtagctaagtaaccactattttaggtttcttagccaatgggtgtgtctgactcctaagcccatggagggcattctgaggtggttcagacagaccccggcttacccttgaacttctgcctgctggctgcatagggaggggctggggggagtttgagcatctcaggccatagagcccctgcctcactgtctccatctctgggtggaaagatggtgttttccctgagaaactaaggctcagagaggttgaatggctctcccaaggtcacacagctggtcagctgcagagttgagaacacaggagtcctggtgctcaggccagcatctctttttttctttgagttgtttctaggtttcctagctcttgcctcagaccttaaagagagagggtctgatggggatgggcactggagacggagcatcccagcatttcacatctgagctggctttcctctgccccaggctgcagctcccactgggaggtggaggaccttggcacccacaagccgcctgtgctgaggccacgaggtcagcccaaccagtgcgtgggccacagggaggccagcatccacgcttcctgctgccatgccccaggtctggaatgcaaagtcaaggagcatggaatcccggcccctcaggagcaggtgaagaggcccgtgaggccgggtgggtggggtgctgcgtgtctctcctgcacagcttttctgtgtcagtttgtgccaccaccataccgccatgcatcagggtggcggtttgccaggtagatgctgtgggcagcttccgccattgtgtggacagcatgtatatgtgtctctgtgtggctgggtctgtttttgcttttgtccagatcagtaaggtttgctacctgggtaccccactccacttggagtagaatgtgcataaatatggcataaagaaatgcaatatgcatgcatttattgattgatctatttttttctgagatggggtcttgctgtgttgcccaggctggtctcaaattcctgggctcaagcaatcctctggtctcagcctccccaagtgttgggattataggcatgagccgctgcacctggcctctctgatctatttaacaaacctgctgggagggtctcagggtcaggagcagcactgggctctgaggacacagagctcactcagccgtgacccagagggggtgcctgagctgcatgctgaaggttgttagcatgaccagcaaggcaagaaaaggccctgccgagattagcaaggcatgtgccaagccctggaatgtgacagccgggccttctagaaacctgagtgtataactctccttaaaagccagtaggagctcctcaaaaggcagccctaaggagtccactcttaaatgaactcagagtcagttttaaaatgcaagtctgtgttgattctggtctggatggtgcattcctcgagagcaaaagacagtcttggtcttggatccacttgccctgggtacactgagggctgctaggttccaggtgctcttcctggcactggggagggatacaggcccaagagacatgctgttctccctcctggagcatctattttagtggaggaagacagaaaacaaaccattaatatagagtactgaaaagatgcgatggagaaaactatagcaaggaagggaatggggtgggagagaggtcaggagaggtctcgctgacaaggtggacgaaacaggccatgaggcagagaacatgttccaggcaaagcaaaggcccccaggtggggatgtgcagggagtaccaggaaaccagagaggtgggaatagttatgagatggggggtgcctcagaggggacagggccaagtcaggtgagacctgagggtcacagtcagcagtgagctggggccatgcaggggtctggcctcagaggagtgtggtctggcctggatctgaacctctcactgtggcctagctgctgagctgagaagagatgacaaggaccttgggcagaagcagggagactggagggaggcggtggagggtccaggcgttggggcggggctcaggctggagtctgaagggagcctgcaggcctggtgggtggatgtgggtgggagagggggaggatggcaccaaggctcgggcccctggacagatggagttgccattaagtgggatggggcaggctatggggccatcagtttcagagggatgagtttggcactggcatggtaggcatctgtctatctccacggccctcaaaccaggcatgaagcaggagctcacgtgtttggtcagccatggtgcagaaccgcctgggtgggaggtgcggggtgggagatacacggttgtgtcccaaatgggctctgagccagcgagggccgtctgcactttggcctcacagaaggatgtcggagggagaaatgaagtgtgggtgggggtcccgggccacgctagacatgtgctttcttttcctcgggctctggcaggtgaccgtggcctgcgaggagggctggaccctgactggctgcagtgccctccctgggacctcccacgtcctgggggcctacgccgtagacaacacgtgtgtagtcaggagccgggacgtcagcactacaggcagcaccagcgaaggggccgtgacagccgttgccatctgctgccggagccggcacctggcgcaggcctcccaggagctccagtgacagccccatcccaggatgggtgtctggggagggtcaagggctggggctgagctttaaaatggttccgacttgtccctctctcagccctccatggcctggcacgaggggatggggatgcttccgcctttccggggctgctggcctggcccttgagtggggcagcctccttgcctggaactcactcactctgggtgcctcctccccaggtggaggtgccaggaagctccctccctcactgtggggcatttcaccattcaaacaggtcgagctgtgctcgggtgctgccagctgctcccaatgtgccgatgtccgtgggcagaatgacttttattgagctcttgttccgtgccaggcattcaatcctcaggtctccaccaaggaggcaggattcttcccatggataggggagggggcggtaggggctgcagggacaaacatcgttggggggtgagtgtgaaaggtgctgatggccctcatctccagctaactgtggagaagcccctgggggctccctgattaatggaggcttagctttctggatggcatctagccagaggctggagacaggtgcgcccctggtggtcacaggctgtgccttggtttcctgagccacctttactctgctctatgccaggctgtgctagcaacacccaaaggtggcctgcggggagccatcacctaggactgactcggcagtgtgcagtggtgcatgcactgtctcagccaacccgctccactacccggcagggtacacattcgcacccctacttcacagaggaagaaacctggaaccagagggggcgtgcctgccaagctcacacagcaggaactgagccagaaacgcagattgggctggctctgaagccaagcctcttcttacttcacccggctgggctcctcatttttacgggtaacagtgaggctgggaaggggaacacagaccaggaagctcggtgagtgatggcagaacgatgcctgcaggcatggaactttttccgttatcacccaggcctgattcactggcctggcggagatgcttctaaggcatggtcgggggagagggccaacaactgtccctccttgagcaccagccccacccaagcaagcagacatttatcttttgggtctgtcctctctgttgcctttttacagccaacttttctagacctgttttgcttttgtaacttgaagatatttattctgggttttgtagcatttttattaatatggtgactttttaaaataaaaacaaacaaacgttgtcctaac

SEQ ID NO: 756 - protein, 692 aa, Homo sapiens
MGTVSSRRSWWPLPLLLLLLLLLGPAGARAQEDEDGDYEELVLALRSEEDGLAEAPEHGTTATFHRCAKDPWRLPGTYVVVLKEETHLSQSERTARRLQAQAARRGYLTKILHVFHGLLPGFLVKMSGDLLELALKLPHVDYIEEDSSVFAQSIPWNLERITPPRYRADEYQPPDGGSLVEVYLLDTSIQSDHREIEGRVMVTDFENVPEEDGTRFHRQASKCDSHGTHLAGVVSGRDAGVAKGASMRSLRVLNCQGKGTVSGTLIGLEFIRKSQLVQPVGPLVVLLPLAGGYSRVLNAACQRLARAGVVLVTAAGNFRDDACLYSPASAPEVITVGATNAQDQPVTLGTLGTNFGRCVDLFAPGEDIIGASSDCSTCFVSQSGTSQAAAHVAGIAAMMLSAEPELTLAELRQRLIHFSAKDVINEAWFPEDQRVLTPNLVAALPPSTHGAGWQLFCRTVWSAHSGPTRMATAVARCAPDEELLSCSSFSRSGKRRGERMEAQGGKLVCRAHNAFGGEGVYAIARCCLLPQANCSVHTAPPAEASMGTRVHCHQQGHVLTGCSSHWEVEDLGTHKPPVLRPRGQPNQCVGHREASIHASCCHAPGLECKVKEHGIPAPQEQVTVACEEGWTLTGCSALPGTSHVLGAYAVDNTCVVRSRDVSTTGSTSEGAVTAVAICCRSRHLAQASQELQ

SEQ ID NO: 757 - RNA, 100 nt, synthetic construct
  source 1..100: mol_type = other RNA
  modified_base 1..3: mod_base = OTHER; note = 2'-O-methyl ribonucleotide
  modified_base 6: mod_base = OTHER; note = nebularine
  modified_base 21: mod_base = OTHER; note = 2'-O-methyl ribonucleotide
  modified_base 28..32: mod_base = OTHER; note = 2'-O-methyl ribonucleotide
  modified_base 34..42: mod_base = OTHER; note = 2'-O-methyl ribonucleotide
  modified_base 46: mod_base = OTHER; note = 2'-O-methyl ribonucleotide
  modified_base 48: mod_base = OTHER; note = 2'-O-methyl ribonucleotide
  modified_base 50: mod_base = OTHER; note = 2'-O-methyl ribonucleotide
  modified_base 52..57: mod_base = OTHER; note = 2'-O-methyl ribonucleotide
  modified_base 60..61: mod_base = OTHER; note = 2'-O-methyl ribonucleotide
  modified_base 66..67: mod_base = OTHER; note = 2'-O-methyl ribonucleotide
  modified_base 70..72: mod_base = OTHER; note = 2'-O-methyl ribonucleotide
  modified_base 74..81: mod_base = OTHER; note = 2'-O-methyl ribonucleotide
  modified_base 83..100: mod_base = OTHER; note = 2'-O-methyl ribonucleotide
  modified_base 1..4: mod_base = OTHER; note = phosphorothioate linkage
  modified_base 97..100: mod_base = OTHER; note = phosphorothioate linkage
aagatncctgaataaccctcgttttagagctagaaatagcaagttaaaataaggctagtccgttatcaacttgaaaaagtggcaccgagtcggtgctttt

SEQ ID NO: 758 - RNA, 100 nt, synthetic construct
  source 1..100: mol_type = other RNA
  modified_base 1..3: mod_base = OTHER; note = 2'-O-methyl ribonucleotide
  modified_base 6: mod_base = OTHER; note = nebularine
  modified_base 11: mod_base = OTHER; note = nebularine
  modified_base 21: mod_base = OTHER; note = 2'-O-methyl ribonucleotide
  modified_base 28..32: mod_base = OTHER; note = 2'-O-methyl ribonucleotide
  modified_base 34..42: mod_base = OTHER; note = 2'-O-methyl ribonucleotide
  modified_base 46: mod_base = OTHER; note = 2'-O-methyl ribonucleotide
  modified_base 48: mod_base = OTHER; note = 2'-O-methyl ribonucleotide
  modified_base 50: mod_base = OTHER; note = 2'-O-methyl ribonucleotide
  modified_base 52..57: mod_base = OTHER; note = 2'-O-methyl ribonucleotide
  modified_base 60..61: mod_base = OTHER; note = 2'-O-methyl ribonucleotide
  modified_base 66..67: mod_base = OTHER; note = 2'-O-methyl ribonucleotide
  modified_base 70..72: mod_base = OTHER; note = 2'-O-methyl ribonucleotide
  modified_base 74..81: mod_base = OTHER; note = 2'-O-methyl ribonucleotide
  modified_base 83..100: mod_base = OTHER; note = 2'-O-methyl ribonucleotide
aagatncctgnataaccctcgttttagagctagaaatagcaagttaaaataaggctagtccgttatcaacttgaaaaagtggcaccgagtcggtgctttt

SEQ ID NO: 759 - RNA, 100 nt, synthetic construct
  source 1..100: mol_type = other RNA
  modified_base 1..3: mod_base = OTHER; note = 2'-O-methyl ribonucleotide
  modified_base 6: mod_base = OTHER; note = nebularine
  modified_base 15: mod_base = OTHER; note = nebularine
  modified_base 21: mod_base = OTHER; note = 2'-O-methyl ribonucleotide
  modified_base 28..32: mod_base = OTHER; note = 2'-O-methyl ribonucleotide
  modified_base 34..42: mod_base = OTHER; note = 2'-O-methyl ribonucleotide
  modified_base 46: mod_base = OTHER; note = 2'-O-methyl ribonucleotide
  modified_base 48: mod_base = OTHER; note = 2'-O-methyl ribonucleotide
  modified_base 50: mod_base = OTHER; note = 2'-O-methyl ribonucleotide
  modified_base 52..57: mod_base = OTHER; note = 2'-O-methyl ribonucleotide
  modified_base 60..61: mod_base = OTHER; note = 2'-O-methyl ribonucleotide
  modified_base 66..67: mod_base = OTHER; note = 2'-O-methyl ribonucleotide
  modified_base 70..72: mod_base = OTHER; note = 2'-O-methyl ribonucleotide
  modified_base 74..81: mod_base = OTHER; note = 2'-O-methyl ribonucleotide
  modified_base 83..100: mod_base = OTHER; note = 2'-O-methyl ribonucleotide
  modified_base 1..4: mod_base = OTHER; note = phosphorothioate linkage
  modified_base 97..100: mod_base = OTHER; note = phosphorothioate linkage
aagatncctgaatanccctcgttttagagctagaaatagcaagttaaaataaggctagtccgttatcaacttgaaaaagtggcaccgagtcggtgctttt

SEQ ID NO: 760 - RNA, 100 nt, synthetic construct
  source 1..100: mol_type = other RNA
  modified_base 1..3: mod_base = OTHER; note = 2'-O-methyl ribonucleotide
  modified_base 6: mod_base = OTHER; note = nebularine
  modified_base 11: mod_base = OTHER; note = nebularine
  modified_base 14: mod_base = OTHER; note = nebularine
  modified_base 21: mod_base = OTHER; note = 2'-O-methyl ribonucleotide
  modified_base 28..32: mod_base = OTHER; note = 2'-O-methyl ribonucleotide
  modified_base 34..42: mod_base = OTHER; note = 2'-O-methyl ribonucleotide
  modified_base 46: mod_base = OTHER; note = 2'-O-methyl ribonucleotide
  modified_base 48: mod_base = OTHER; note = 2'-O-methyl ribonucleotide
  modified_base 50: mod_base = OTHER; note = 2'-O-methyl ribonucleotide
  modified_base 52..57: mod_base = OTHER; note = 2'-O-methyl ribonucleotide
  modified_base 60..61: mod_base = OTHER; note = 2'-O-methyl ribonucleotide
  modified_base 66..67: mod_base = OTHER; note = 2'-O-methyl ribonucleotide
  modified_base 70..72: mod_base = OTHER; note = 2'-O-methyl ribonucleotide
  modified_base 74..81: mod_base = OTHER; note = 2'-O-methyl ribonucleotide
  modified_base 83..100: mod_base = OTHER; note = 2'-O-methyl ribonucleotide
  modified_base 1..4: mod_base = OTHER; note = phosphorothioate linkage
  modified_base 97..100: mod_base = OTHER; note = phosphorothioate linkage
aagatncctgnatnaccctcgttttagagctagaaatagcaagttaaaataaggctagtccgttatcaacttgaaaaagtggcaccgagtcggtgctttt

SEQ ID NO: 761 - RNA, 100 nt, synthetic construct
  source 1..100: mol_type = other RNA
  modified_base 1..3: mod_base = OTHER; note = 2'-O-methyl ribonucleotide
  modified_base 4: mod_base = OTHER; note = nebularine
  modified_base 6: mod_base = OTHER; note = nebularine
  modified_base 21: mod_base = OTHER; note = 2'-O-methyl ribonucleotide
  modified_base 28..32: mod_base = OTHER; note = 2'-O-methyl ribonucleotide
  modified_base 34..42: mod_base = OTHER; note = 2'-O-methyl ribonucleotide
  modified_base 46: mod_base = OTHER; note = 2'-O-methyl ribonucleotide
  modified_base 48: mod_base = OTHER; note = 2'-O-methyl ribonucleotide
  modified_base 50: mod_base = OTHER; note = 2'-O-methyl ribonucleotide
  modified_base 52..57: mod_base = OTHER; note = 2'-O-methyl ribonucleotide
  modified_base 60..61: mod_base = OTHER; note = 2'-O-methyl ribonucleotide
  modified_base 66..67: mod_base = OTHER; note = 2'-O-methyl ribonucleotide
  modified_base 70..72: mod_base = OTHER; note = 2'-O-methyl ribonucleotide
  modified_base 74..81: mod_base = OTHER; note = 2'-O-methyl ribonucleotide
  modified_base 83..100: mod_base = OTHER; note = 2'-O-methyl ribonucleotide
  modified_base 1..4: mod_base = OTHER; note = phosphorothioate linkage
  modified_base 97..100: mod_base = OTHER; note = phosphorothioate linkage
aagntncctgaataaccctcgttttagagctagaaatagcaagttaaaataaggctagtccgttatcaacttgaaaaagtggcaccgagtcggtgctttt

SEQ ID NO: 762 - RNA, 100 nt, synthetic construct
  source 1..100: mol_type = other RNA
  modified_base 1..3: mod_base = OTHER; note = 2'-O-methyl ribonucleotide
  modified_base 4: mod_base = OTHER; note = nebularine
  modified_base 6: mod_base = OTHER; note = nebularine
  modified_base 15: mod_base = OTHER; note = nebularine
  modified_base 21: mod_base = OTHER; note = 2'-O-methyl ribonucleotide
  modified_base 28..32: mod_base = OTHER; note = 2'-O-methyl ribonucleotide
  modified_base 34..42: mod_base = OTHER; note = 2'-O-methyl ribonucleotide
  modified_base 46: mod_base = OTHER; note = 2'-O-methyl ribonucleotide
  modified_base 48: mod_base = OTHER; note = 2'-O-methyl ribonucleotide
  modified_base 50: mod_base = OTHER; note = 2'-O-methyl ribonucleotide
  modified_base 52..57: mod_base = OTHER; note = 2'-O-methyl ribonucleotide
  modified_base 60..61: mod_base = OTHER; note = 2'-O-methyl ribonucleotide
  modified_base 66..67: mod_base = OTHER; note = 2'-O-methyl ribonucleotide
  modified_base 70..72: mod_base = OTHER; note = 2'-O-methyl ribonucleotide
  modified_base 74..81: mod_base = OTHER; note = 2'-O-methyl ribonucleotide
  modified_base 83..100: mod_base = OTHER; note = 2'-O-methyl ribonucleotide
  modified_base 1..4: mod_base = OTHER; note = phosphorothioate linkage
  modified_base 97..100: mod_base = OTHER; note = phosphorothioate linkage
aagntncctgaatanccctcgttttagagctagaaatagcaagttaaaataaggctagtccgttatcaacttgaaaaagtggcaccgagtcggtgctttt

SEQ ID NO: 763 - RNA, 100 nt, synthetic construct
  source 1..100: mol_type = other RNA
  modified_base 1..3: mod_base = OTHER; note = 2'-O-methyl ribonucleotide
  modified_base 4: mod_base = OTHER; note = nebularine
  modified_base 14: mod_base = OTHER; note = nebularine
  modified_base 21: mod_base = OTHER; note = 2'-O-methyl ribonucleotide
  modified_base 28..32: mod_base = OTHER; note = 2'-O-methyl ribonucleotide
  modified_base 34..42: mod_base = OTHER; note = 2'-O-methyl ribonucleotide
  modified_base 46: mod_base = OTHER; note = 2'-O-methyl ribonucleotide
  modified_base 48: mod_base = OTHER; note = 2'-O-methyl ribonucleotide
  modified_base 50: mod_base = OTHER; note = 2'-O-methyl ribonucleotide
  modified_base 52..57: mod_base = OTHER; note = 2'-O-methyl ribonucleotide
  modified_base 60..61: mod_base = OTHER; note = 2'-O-methyl ribonucleotide
  modified_base 66..67: mod_base = OTHER; note = 2'-O-methyl ribonucleotide
  modified_base 70..72: mod_base = OTHER; note = 2'-O-methyl ribonucleotide
  modified_base 74..81: mod_base = OTHER; note = 2'-O-methyl ribonucleotide
  modified_base 83..100: mod_base = OTHER; note = 2'-O-methyl ribonucleotide
  modified_base 1..4: mod_base = OTHER; note = phosphorothioate linkage
  modified_base 97..100: mod_base = OTHER; note = phosphorothioate linkage
aagntacctgaatnaccctcgttttagagctagaaatagcaagttaaaataaggctagtccgttatcaacttgaaaaagtggcaccgagtcggtgctttt

SEQ ID NO: 764 - RNA, 100 nt, synthetic construct
  source 1..100: mol_type = other RNA
  modified_base 1..3: mod_base = OTHER; note = 2'-O-methyl ribonucleotide
  modified_base 11: mod_base = OTHER; note = nebularine
  modified_base 21: mod_base = OTHER; note = 2'-O-methyl ribonucleotide
  modified_base 28..32: mod_base = OTHER; note = 2'-O-methyl ribonucleotide
  modified_base 34..42: mod_base = OTHER; note = 2'-O-methyl ribonucleotide
  modified_base 46: mod_base = OTHER; note = 2'-O-methyl ribonucleotide
  modified_base 48: mod_base = OTHER; note = 2'-O-methyl ribonucleotide
  modified_base 50: mod_base = OTHER; note = 2'-O-methyl ribonucleotide
  modified_base 52..57: mod_base = OTHER; note = 2'-O-methyl ribonucleotide
  modified_base 60..61: mod_base = OTHER; note = 2'-O-methyl ribonucleotide
  modified_base 66..67: mod_base = OTHER; note = 2'-O-methyl ribonucleotide
  modified_base 70..72: mod_base = OTHER; note = 2'-O-methyl ribonucleotide
  modified_base 74..81: mod_base = OTHER; note = 2'-O-methyl ribonucleotide
  modified_base 83..100: mod_base = OTHER; note = 2'-O-methyl ribonucleotide
  modified_base 1..4: mod_base = OTHER; note = phosphorothioate linkage
  modified_base 97..100: mod_base = OTHER; note = phosphorothioate linkage
aagatacctgnataaccctcgttttagagctagaaatagcaagttaaaataaggctagtccgttatcaacttgaaaaagtggcaccgagtcggtgctttt

SEQ ID NO: 765 - RNA, 100 nt, synthetic construct
  source 1..100: mol_type = other RNA
  modified_base 1..3: mod_base = OTHER; note = 2'-O-methyl ribonucleotide
  modified_base 11: mod_base = OTHER; note = nebularine
  modified_base 15: mod_base = OTHER; note = nebularine
  modified_base 21: mod_base = OTHER; note = 2'-O-methyl ribonucleotide
  modified_base 28..32: mod_base = OTHER; note = 2'-O-methyl ribonucleotide
  modified_base 34..42: mod_base = OTHER; note = 2'-O-methyl ribonucleotide
  modified_base 46: mod_base = OTHER; note = 2'-O-methyl ribonucleotide
  modified_base 48: mod_base = OTHER; note = 2'-O-methyl ribonucleotide
  modified_base 50: mod_base = OTHER; note = 2'-O-methyl ribonucleotide
  modified_base 52..57: mod_base = OTHER; note = 2'-O-methyl ribonucleotide
  modified_base 60..61: mod_base = OTHER; note = 2'-O-methyl ribonucleotide
  modified_base 66..67: mod_base = OTHER; note = 2'-O-methyl ribonucleotide
  modified_base 70..72: mod_base = OTHER; note = 2'-O-methyl ribonucleotide
  modified_base 74..81: mod_base = OTHER; note = 2'-O-methyl ribonucleotide
  modified_base 83..100: mod_base = OTHER; note = 2'-O-methyl ribonucleotide
  modified_base 1..4: mod_base = OTHER; note = phosphorothioate linkage
  modified_base 97..100: mod_base = OTHER; note = phosphorothioate linkage
aagatacctgnatanccctcgttttagagctagaaatagcaagttaaaataaggctagtccgttatcaacttgaaaaagtggcaccgagtcggtgctttt

SEQ ID NO: 766 - RNA, 100 nt, synthetic construct
  source 1..100: mol_type = other RNA
  modified_base 1..3: mod_base = OTHER; note = 2'-O-methyl ribonucleotide
  modified_base 3: mod_base = i
  modified_base 21: mod_base = OTHER; note = 2'-O-methyl ribonucleotide
  modified_base 28..32: mod_base = OTHER; note = 2'-O-methyl ribonucleotide
  modified_base 34..42: mod_base = OTHER; note = 2'-O-methyl ribonucleotide
  modified_base 46: mod_base = OTHER; note = 2'-O-methyl ribonucleotide
  modified_base 48: mod_base = OTHER; note = 2'-O-methyl ribonucleotide
  modified_base 50: mod_base = OTHER; note = 2'-O-methyl ribonucleotide
  modified_base 52..57: mod_base = OTHER; note = 2'-O-methyl ribonucleotide
  modified_base 60..61: mod_base = OTHER; note = 2'-O-methyl ribonucleotide
  modified_base 66..67: mod_base = OTHER; note = 2'-O-methyl ribonucleotide
  modified_base 70..72: mod_base = OTHER; note = 2'-O-methyl ribonucleotide
  modified_base 74..81: mod_base = OTHER; note = 2'-O-methyl ribonucleotide
  modified_base 83..100: mod_base = OTHER; note = 2'-O-methyl ribonucleotide
  modified_base 1..4: mod_base = OTHER; note = phosphorothioate linkage
  modified_base 97..100: mod_base = OTHER; note = phosphorothioate linkage
aanatacctgaataactctcgttttagagctagaaatagcaagttaaaataaggctagtccgttatcaacttgaaaaagtggcaccgagtcggtgctttt

SEQ ID NO: 767 - RNA, 100 nt, synthetic construct
  source 1..100: mol_type = other RNA
  modified_base 1..3: mod_base = OTHER; note = 2'-O-methyl ribonucleotide
  modified_base 3: mod_base = i
  modified_base 10: mod_base = i
  modified_base 21: mod_base = OTHER; note = 2'-O-methyl ribonucleotide
  modified_base 28..32: mod_base = OTHER; note = 2'-O-methyl ribonucleotide
  modified_base 34..42: mod_base = OTHER; note = 2'-O-methyl ribonucleotide
  modified_base 46: mod_base = OTHER; note = 2'-O-methyl ribonucleotide
  modified_base 48: mod_base = OTHER; note = 2'-O-methyl ribonucleotide
  modified_base 50: mod_base = OTHER; note = 2'-O-methyl ribonucleotide
  modified_base 52..57: mod_base = OTHER; note = 2'-O-methyl ribonucleotide
  modified_base 60..61: mod_base = OTHER; note = 2'-O-methyl ribonucleotide
  modified_base 66..67: mod_base = OTHER; note = 2'-O-methyl ribonucleotide
  modified_base 70..72: mod_base = OTHER; note = 2'-O-methyl ribonucleotide
  modified_base 74..81: mod_base = OTHER; note = 2'-O-methyl ribonucleotide
  modified_base 83..100: mod_base = OTHER; note = 2'-O-methyl ribonucleotide
  modified_base 1..4: mod_base = OTHER; note = phosphorothioate linkage
  modified_base 97..100: mod_base = OTHER; note = phosphorothioate linkage
aanatacctnaataactctcgttttagagctagaaatagcaagttaaaataaggctagtccgttatcaacttgaaaaagtggcaccgagtcggtgctttt

SEQ ID NO: 768 - protein, 36 aa, synthetic construct
  VARIANT 27..29: note = Residues may be deleted
  VARIANT 34..35: note = Residues may be deleted
HXGXXXXXXXXXXXXXXXXXXXXXXXXXXPCXXXXC

SEQ ID NO: 769 - protein, 16 aa, synthetic construct
SGSETPGTSESATPES

SEQ ID NO: 770 - protein, 4 aa, synthetic construct
SGGS

SEQ ID NO: 771 - protein, 120 aa, synthetic construct
  VARIANT 5..120: note = SGGS repeats may be deleted
SGGSSGGSSGGSSGGSSGGSSGGSSGGSSGGSSGGSSGGSSGGSSGGSSGGSSGGSSGGSSGGSSGGSSGGSSGGSSGGSSGGSSGGSSGGSSGGSSGGSSGGSSGGSSGGSSGGSSGGS

SEQ ID NO: 772 - protein, 120 aa, synthetic construct
  VARIANT 5..120: note = GGGS repeats may be deleted
GGGSGGGSGGGSGGGSGGGSGGGSGGGSGGGSGGGSGGGSGGGSGGGSGGGSGGGSGGGSGGGSGGGSGGGSGGGSGGGSGGGSGGGSGGGSGGGSGGGSGGGSGGGSGGGSGGGSGGGS

SEQ ID NO: 773 - protein, 150 aa, synthetic construct
  VARIANT 6..150: note = GGGGS repeats may be deleted
GGGGSGGGGSGGGGSGGGGSGGGGSGGGGSGGGGSGGGGSGGGGSGGGGSGGGGSGGGGSGGGGSGGGGSGGGGSGGGGSGGGGSGGGGSGGGGSGGGGSGGGGSGGGGSGGGGSGGGGSGGGGSGGGGSGGGGSGGGGSGGGGSGGGGS

SEQ ID NO: 774 - protein, 30 aa, synthetic construct
  VARIANT 2..30: note = Residues may be deleted
GGGGGGGGGGGGGGGGGGGGGGGGGGGGGG

SEQ ID NO: 775 - protein, 150 aa, synthetic construct
  VARIANT 6..150: note = EAAAK repeats may be deleted
EAAAKEAAAKEAAAKEAAAKEAAAKEAAAKEAAAKEAAAKEAAAKEAAAKEAAAKEAAAKEAAAKEAAAKEAAAKEAAAKEAAAKEAAAKEAAAKEAAAKEAAAKEAAAKEAAAKEAAAKEAAAKEAAAKEAAAKEAAAKEAAAKEAAAK

SEQ ID NO: 776 - protein, 90 aa, synthetic construct
  VARIANT 4..90: note = GGS repeats may be deleted
GGSGGSGGSGGSGGSGGSGGSGGSGGSGGSGGSGGSGGSGGSGGSGGSGGSGGSGGSGGSGGSGGSGGSGGSGGSGGSGGSGGSGGSGGS

SEQ ID NO: 777 - protein, 60 aa, synthetic construct
  VARIANT 3..60: note = XP repeats may be deleted
XPXPXPXPXPXPXPXPXPXPXPXPXPXPXPXPXPXPXPXPXPXPXPXPXPXPXPXPXPXP

SEQ ID NO: 778 - protein, 24 aa, synthetic construct
SGGSSGSETPGTSESATPESSGGS

SEQ ID NO: 779 - protein, 32 aa, synthetic construct; identical to SEQ ID NO: 693

SEQ ID NO: 780 - protein, 104 aa, synthetic construct; identical to SEQ ID NO: 740

SEQ ID NO: 781 - protein, 24 aa, synthetic construct
SGGSSGGSSGSETPGTSESATPES

SEQ ID NO: 782 - protein, 40 aa, synthetic construct; identical to SEQ ID NO: 742

SEQ ID NO: 783 - protein, 64 aa, synthetic construct; identical to SEQ ID NO: 743

SEQ ID NO: 784 - protein, 92 aa, synthetic construct; identical to SEQ ID NO: 744

SEQ ID NO: 785 - protein, 6 aa, synthetic construct
SSVFAQ

SEQ ID NO: 786 - protein, 150 aa, synthetic construct; identical to SEQ ID NO: 773
  VARIANT 16..150: note = GGGGS repeats may be deleted

SEQ ID NO: 787 - protein, 30 aa, synthetic construct; identical to SEQ ID NO: 774
  VARIANT 4..30: note = Residues may be deleted

SEQ ID NO: 788 - protein, 150 aa, synthetic construct; identical to SEQ ID NO: 775
  VARIANT 16..150: note = EAAAK repeats may be deleted

SEQ ID NO: 789 - protein, 120 aa, synthetic construct; identical to SEQ ID NO: 771
  VARIANT 13..120: note = SGGS repeats may be deleted

SEQ ID NO: 790 - protein, 60 aa, synthetic construct; identical to SEQ ID NO: 777
  VARIANT 7..60: note = XP repeats may be deleted, wherein X is any amino acid

SEQ ID NO: 791 - protein, 21 aa, synthetic construct
  VARIANT 1..21: note = 4 or 6 GGS repeats may be deleted
GGSGGSGGSGGSGGSGGSGGS

SEQ ID NO: 792 - DNA, 20 bp, synthetic construct
  source 1..20: mol_type = other DNA
aagatacctgaataactctc

SEQ ID NO: 793 - DNA, 20 bp, synthetic construct
  source 1..20: mol_type = other DNA
aagatacctgaataactctc

SEQ ID NO: 794 - DNA, 24 bp, synthetic construct
  source 1..24: mol_type = other DNA
tcggaagatacctgaataactctc

SEQ ID NO: 795 - DNA, 20 bp, synthetic construct
  source 1..20: mol_type = other DNA
aagatacctgaataactctc

SEQ ID NO: 796 - DNA, 20 bp, synthetic construct
  source 1..20: mol_type = other DNA
aagatacctgaataactctc

SEQ ID NO: 797 - DNA, 20 bp, synthetic construct
  source 1..20: mol_type = other DNA
aagatacctgaataactctc

SEQ ID NO: 798 - DNA, 20 bp, synthetic construct
  source 1..20: mol_type = other DNA
aagatacctgaataactctc

SEQ ID NO: 799 - DNA, 20 bp, synthetic construct
  source 1..20: mol_type = other DNA
aagatacctgaataactctc

SEQ ID NO: 800 - DNA, 20 bp, synthetic construct
  source 1..20: mol_type = other DNA
aagatacctgaataactctc

SEQ ID NO: 801 - protein, 7 aa, synthetic construct
AAGGQHH

SEQ ID NO: 802 - protein, 5 aa, synthetic construct
AAGGQ

SEQ ID NO: 803 - protein, 7 aa, synthetic construct
AAGGQAH

SEQ ID NO: 804 - protein, 9 aa, unidentified
  source 1..9: note = LAGLIDADG family motif
LAGLIDADG
